United States Patent Application Publication US 2026/0258423 A1 - sequence listing, part 23

SEQ ID NO: 167803 - DNA, 46709983 bp, Homo sapiens (residues 26,691,425-28,359,638 of 46,709,983)
  source 1..46709983: mol_type = genomic DNA
gatatcatttgagttcttgctaaaagctgccattttcatttctacagcttaattgcttacaaattaatgattcataatatttcacaattttcacttaaatggtctggcatatattcctattgtaatcatgtcataaaattaaggggaaattgaatgccttgcagagtccgataaagacaagttcattctttcttgtgcaatgatttcctataacatttggagttatatcaaatctaaatttgtattctaagcagaaattacatgtgtttttcccgaacatgtgttttcttatgctcctaacctgtgaaataggaacttataaactattcttttaaaggcaagcatatcaatttagatgtcttcctttgcagagaaaatcagatacaaataatcctatgaaaatatagttgcataagagtgaaccatcttattgtttatttcagatttgctcataccagcttgtgtatattgttgagacagctcactgaatggcattattcaatggtttctctttgtggctcatcgcctttgagaccatacttataaagtacacctaatggaagtgtcttagagccttcttaagtgttttgctgagccaggagaggaactgaattatagatcaaaagaactaacgtgtttcagttggcaaaaggttgtcttagtcttcacagacttgccaatctcttcttccaccaatgaagtatttcactcagttagctataggaaagcatttgtttgttatgaacaaattactttaaattcaactcctgacttattgctgaaaatgtaattttcctacacacacacagacatacacacacacacttacacacatgcacacaaagtaaactctgtcctaatgtatttgcccagtagttttttttgctttgttttgtttttgttttaactgaactggggctggcagaaaaaaagcaacagaaactggagaaaaattaaaagagaaacaatataaagaatttgatataggaatgactaagcttacttaaatgaattgtgagatataaacttgtcaatatgattttggttgcagaagattgtatattacataagcttcacagatgacatgcatatccagaaactacagtaatttacaggggcaaactctgcaactaagaaaaggagacagaactgtttccactcaatgcattcctccatcaaagaacaaggtagcaaaatggttgagaattgcgtatttggcaagacactgcctatctttaacacctgggtatgccacttgctacctaaccttgaacaagtgactacttctctatgttacatttgtttcatctgtaaaatgggggtaacactgatgtctagtataaaatgctgttggaggtttacatgagataatccatataaaatctctagcgcaatgccagtcacatagtaaattctctgtaaatattagttctgactatgcttataagcacttcatcttcaaatgtggaatttttgaatattacaatgggaaggtattgattcattatttattcaataaacatgcctactgtgtcttcaaaaataagaccataaaggatggtgaattaaaaataaagtgcaggaaaggaattatttttttctaatgttatatgatggttagcactgtacagaaaaacagactcaaccctctaaatcagttgtctgttttattaaggacgtatcattttcacaagggaatcttgataaatacaaatttatcactccactcactcattcattcattcatccactaaacagtcctttacttcttacctaccacacatcaggctaatgctaagaactgatacaaagactcaaccacacatgatctgtgacttcaagaacatagagatcttatggtacgaaagatatgtaaagataaattataattaattgacacagcatgtgctactttgagagaataaacccaaagctgaattttaatgcaactattaggtttgaataggcagaaaagcagagaaaagcatctctggaatgggaacacttgacccagagaagaaagaatgcaaggagatgccaggtttggaaatggagagaagcttagtgcttagccaaacttgggaaggggcttcagtgtcaacctaagaaattcagcttcctaaaattgtagtaacaacaggaaattttaagcagggagatgactttgtggtaggaaagaaaatgaactagagtgggaaggaagttggagataccaatgatatagagactgtccagaggtagctgcaatattcaagatgagaaataattgagccttaaatgatctagggggaagaagctacagaacaaaaaaacacacaaaactatgaaagagagttgctagttagaatcttcgtgagcaagggactaaatatatttcagtggaagaagtagtatatcttgtgatttagtgattctcacattttaaaattgaggtaactactttctgacatgaaactataagtgcaaaattttgatatagatacttagaatttgccttagttgtgaagtagcctgtaatgtaaagcatttctctgagaaacaaaagtggatttttcctcttagtcagagtttcttgaaacccacatgtgaaagatgccttgatataaaacatgtatgttttaactttgggctcagttttgcaggaatgtatctgagatggaaaaccagatggctatatttcaatgtattttctcttccattttatggaaaatgacccatgatctattttggcttacatgagatttactcataaatatatatgagtataatgccttgcagctcctgtttaatgcatttatgaaaaatttttcactttctgggaagcttttcattcagggcagctgcctggaaacacttatgatctctgaggagaagctttgaacgtgcacaggcatttttaaaaatggtatgttgttaggcaactaaaaatcacaagctcaacatggtagcattatctttttgtcagaggtgtgaactggctcttccataatcaggctttcaacacttggaaagtttttttctgagtacgtatttcctcatctgtaaaataggcgggttctgttctgatttcatcaagttatgataaaagaaaagcacagtaggtaggtatgataaaagaaaagcacagtaggtaaataatcaattatagtgacatttcttcctcttcactccttttgctacccaagtgacgtatcatacagcaagctaacacttggtagaatgccaatttagtatgatactggtttccagttaatttaggactataaaaagtgctggcaatgcccaactcaaacttacgtttgaattggctttttaaattgctatatgtcataaagaccagttgataggctgggcatagtggctcatacctgtaatcccagcactttgagaggccaaggagggcggatcaaaaggtcaggagttcaagagcagcctggccaacatggtgaaatcctgtctctactaaaaatacaaatatcagccaggcatggtggcacatacctgtaatctcagctacttgggaggctgaggcaggagaattgcttgaactcaggaggtggaggttgcactgagccgggatcaagccactgcactccagcctggatgacagagcaagactctgtcttaaaaaaaaaaaaaaaaaaaaaaaaaagaaacagttgacaaaagaacctaaaattataatttagagttcttgagattatttaactgtaacttatggtaattcaactggccatagtgactattcgtatgatgaaagagtatgtgatgagcaacaatgaaatgagataggtccaacagagcttttccaggtgcagatgctcccagccacggacagtctggctggtaggcaaacatggaatccagggacttcaagcatctccactcagatccattttggaggaggcaaaatgaagtaccagatgtttgggggcagataagttccaaagaaaatgattactgagagtcagttaaccaggctgtcagcttctgcaaactctatcataagtcagttgactccagactgcaaactggtgcttaggaataccaatgattgcctctaaaggcagaaattaaatgctttgtactggacattgccaaccttaagttccctggtgcacttgggtaccaccatccggatgctctgagtgtgaggtgccaaagtgcccttgtattttctgtagttctcaatggttagatgtcacactcggttccctgaagaaaatgtctctctcccagtcctgtgggcatcttatcaatttatcatcatcaagattcagcctcaagtttcttcccatctaaggggcctgtttagagcctctaagctttctgctttcagaaagctacatattcactagagagaatgggtatctattctgaattttctctagtatgacgagattactgtcttatattgttcttcatttcttcctaagtgtcagtcttatctccccaaggagattgtaagcgccttggaggcagggatcatgttttatattcctggggcctcacatcctttgaatatacaattgagcagatattaagagatacttagtaatggatttattgaacttgaaatctgaaactgctaattctagaattattaccatacatttgtgtatttttggggattttgcataaaaatactgtaggtagctatattcttttcacctgctcccataaactatcaaagtttatgtctcacgtatttagttctatcagatattgagttaatcacttttttaggaagaaagattttggagaaagaaagttggcttctttactccatcttcctactttatatatttggaatttttcattagacatgactaaagaagtagaaggagaaacaaagatctaacttttaaattattcactaggcctgcacaggtttggtatgcagattagctcaacagatagaggtagatcaacatggcaaattaaaaataatatctaaggtttaattcacacgttgtatgacagtctcactcttctatgtcaaccatggacctataccttagaatttattgtctccgctcttccaaattctgttccttccaaatccttggccagacatccaggacattggccactgaatggaaatctgtacatattatcactttgggctacttctctttccacaaaaagtgaatgcttaagttcactgctcatagctctgcccattggaaagaatttccctttttgctctttttcaaggccactcctatatgtgtctatagtgcagccaccatccatttcagcccaggtaatgagccaaccaatccattacctatgcttggactttgccctcatctttcagttgtttcaattgtgcccttcatagaaccatgactgcaaggcagtcccaggtcctcttatcacctgttttatcagaccacatctagtaccatttgtgttagttagttcaggtcctccaagaagccccttcacagattttactagggaaaatccctgtgagaaaaaatggggaggaagaacagagaggctgggagagtcatcataccccacgcaagtctgaccatgagggaaggaaagagaaaaggaaggttgggtggaagcgtcatagaccagtatgcagtctcaaggaagtccagcaagagaccactggggagtccatgaggcagagttgcatgaaaagagaagatatctgtatcctaatgtcaaaactgccttagcatcactgtgcctacgggaagcatgatgtcagcttaaacatggtgatggatttcaaagaacagccagagcctctgtgcattacacttcctctagttcgaattctgcaaggtgcattgtcatggccaccaaattaatgtttctaaaaacacataaattctaagcaatctcaattcacaattcagaatagaatgttctgcatcaactcaggagttctattcttatgatatgagattcatgggtagaaattaaaatggacaattttatctaaccactattagcgaaaactataattggaacaaaatctttttacctcttgctctcatggatgtttgggtttttcaaatgtctttgtcattacttgtgattcacctgcttagcacgttcctgttcaacctttaagcctctggcttacttgccttcttcctgtgaagctccatggtattgcactcttaactgtgttatgtcccactagaatgtaatgtttttgaggtcaggaactgtgcgtgtatggtttgttgttgtatataatgtgcagtataatacctggtgcttattatgcattcagttcatgtttgttaaacaaatgcatagaatcattgtctttaggcactaccctacttataacgaattgaagaaatgataaaatccattattattacagctatttgtatggtatagaacagacctaattttctattatgtgatttggcttctgaaaatttatttactcaattcctttctgtagttaggttcacatgcacccatattacatgaatatattcatgccatctcagagatcattaggatgacaaaaaaaaaaaaaaaaaaaaaacatataacggctatcaattttccccaaaaaccagcaggtataagcaattgttattcacattgttcattttataagcaatataggaactctgcatttaaataggaaaattgagtgatttctaaaatcagaagctaatatattttggattattattttaaaaagtttaaaggatacatatatacatctgtaggtttcctggagtctccaaatcagggatgccagccatcctagagtgtcactaaagtgagaggcagcatgaacttgtctcagatatgttggcatgatttaggagtgggtagggatggtagaacaagagtgatccaatattttaaaatattttcttctgacatagtaattactgcatacatgacatcatgattttttcctcttcactcattcttagcctgtggcactcaactctcctgctaggcaatcagcaccaggactacttttgaagtggtctgctgctgggatgcattcacttggcctctgcctctatattgtttttggtcacctttcccatctttctcttactattcccaatccttatccatatgccagcctgctggctatgccgaattctcactctggctttcctctaatacttggcatctggggctggagctcttgcgctgcaggcttcttgctgctctctggaggccctattctacgggagctgctctcagcaagctgtcaagttagaaaggaaataatgaagcattagctgaagagtcaatatctgataaggcttaatgtgccagccctaatgatagtttgcattttcttctgggaatagttatttgaaaactgaaaaaaaaaaaatagtaccaggatccccctctttccccaccctccccaccaccatggatgccaaaatccacagatgctcaagtatcttatatataatggtataatatttgcatataacttatgcatgttattctatataccttaaataacatctagattacttataatcctgaatataatgtaaatgccatgtaaattgttgttacgctgcattgttttttaatttattttttcatttctttttaaaatatttttgatccatacttggttgaatctgtggagccagaacctgtagataccaagtgttatctgaggactgtatttaaggtgtaaggtacaggatagtgtagatttgggggataagtagcgttttctgatataaagaaggctaccatctaagaccatccgtgaattgttattataatcagataaaaaagtcaaataaaaatgagtgaatattttaaaaaattatgtgactcatttcttttgagtaacttgacagctatggtcacattaattgtgtacagagatatagctttagctgtttcttaggaaatttgaatttaattaaacatgaataaaaagccaaaaagatctttgttttattagtgtctctccttcaattatcataataaagagataatctccagcaaaaacaaaactaaaaaacttttacaattaaagcatacaatgtccaatttccaacattctaaactatcattaaaacatttatttttttctctttattccttgctgcaaggagttatttaaaactaaacccaaaatatccactccatagctcatctaacctgcatataaatagagaatatatgtcaactttcaacttacagattcaccaagtaaaggaaaaacttttaatgatttcaactctaggaaggaaatgtcttaatcaccataaaaatggtgtcattagaaaaacagtctgttttatatcttaatatttgtagcattatttgccctggtattatagtttttcatcaacctaagaaagtgagttgtttaaccttattattggatgcaaataagcatgtttttaaggtacagtatagtttactgtgtaatgtgtatcaaggatgaagccaagagaagaaaataactcattaaaagtgtcacttgttactgcagcaataatcaatagagcattaaacatcacatcttattgcaatgaatggggaataaacatgaagtccacagtgcactcttgtaaatggtatgacttgtaaatgtcagtgaggacttatttaatactaaaaggctataagaatttgcaaagggagttttaaaattcatccaagatagctgaaggttacatgaagaaagggcagctatatatagcatgcacacactcaggtaatgtaaaatatgaatggatgaaaaagaaccaaacctaattctaattggagggttcattatatttgatattctagaaagagcatgtattgagacctggaagtttggcattatgaatattttattgcatatcttgctttatattcactttatattcatataaagcaggcttttttttttttccaatgtaagcagtgtatatgtataggtagagagcaaagaaaaatcttacagattaatgcagttcagaatacatcatttaggtgaattgtattctctttctggaagcttcttttaaaatttataatctgcaacatctcattgcacaaaatttccatctcttcatccaagcaagttaaatttgtcttgatttatctgcatattgatctgtaaacctgataattgatagggaagattcttggagatttctaaagtctgtcatttttatagatgcagactttcatgtagcacaatcagaacattctgacatagaaaaaaaaaataatcaatgtatgtgatatagtttggctctgtgtccccacggaaatatcaccttgaattgtaataatccccacatgtgaaaggcgggatcaagtgcaaataattgaatcatggggttagtttccctcatgctgctcttgtgatactgaatgaattttcataagatctgatggttttattaatataaggggcttcccccttttctcagtacatctctctcctgctgccatgtgaagaaggttgtgtttgcttccccttctgccatgaatggaagtttccagaggcctccccagccatgcagaactgtgagtcgatcaaacctctttccattataaattacccagtctcaagtaagtccgtttagcaatgtgagaatggactaatacagtatgttaacaggaaccctggtggcttaactcattgtggaaatggacagcatgggttacaaaactcatatcttagagaggtttggccattatcaaagcaaaattctctttcatgggactagttttagtttctctccatggacttattttgaggtgaaaacagtagagaaactccatggaaaatttaggtcttttgtcttgaatatgctatagagttaaaaatgcaatattacccttttcacaagtttaatttagcattcctcataatggtttatatttcaaacaaaaaaaattatcatagtgttttagtccattttcgtattgctgtgaagaaatactcaagactgggtaatttataaagaaaagaagtttaatggactcacagttccacatggctggggaggcctcacagtcatggtggaaggcaagggaggagcaaatgcttacatggcatcaggcaagagagcatgtgcagagaacctgccctttataaaaccatcacatctcaagagacttattcactatcatgagaacagcatgggaatatctcgcccccatgattcaattacctcccacctggcccctctcatgacacatggggattatgggagctacaattcaagatgagatttggttggagacagagccaaaccatataattccacctctagcccctcccaaatctcatgtcctcatatttcaaaaccaatcatgccttccaaacagttccccaaagtcttaacttattttagcattaactcaaaagtccatagtccagtctcatctgagacaaggcaaatcccttcgacctatgagcctgtaaaatcaaaagcaagttggttactccctagatacaatgggggtacaggcattgggtaaatacaccctttccaaatgggagaaattggtcaaaacaaaggggttacaggccccatgcaagtccaaaaacaaataggatagtcattaaaccttaaagttccagaatgatcttctttgactccatgtctcacatacagggtcattctgatacaagaggtaggcttccatggccgtgggcagctctgtccctgtggctttgcagggtacagctcccctcttggctgctttcatgggctggcattgagtgtccgtggcttttccaggcacacagtgcaagatgtcagtggatctaccattctagggtctgggtagtcctcttctcacagctccactaggcagtaccccagtggggattctctgtgggggctccaaccccacatttcccttctgcacttccctagcagaggttctccataagggccctgcccctgcagcaaacttctgcctggacatccaggcattttcatatatcctctgaaatctaggtggagattcccaaatctcaattcttaacttctgtgcacctgcaggctcaacatcacatggaagctgccaaggtgtggggcttgcaccctctgaaggaatggcctgaactgtaccttggcatatttcagccatgggtggagtggctaggacacagggcagtaagtccctaggctgcacacagcaggggggcccagggcccagcccaggaaaccattttttttctcctagggctctgggcctgtgatgggaggggctgcagtgaaggtgtctgacatgcccttgagacattttccccattgtcttggtaattaacatttggctcctcataacttatgcaaatttctgcagccagcttgaatttctcctcagaaagtgggtttttcttttttatcacatcatcaggctgcaaattttccaaacttatcctctgcttcccttttaaatgttaagttccatttctaaatcatgtctttgtgaacacataaaactgaatcctttttaccagcacccaagtcactcttgaactctttgctgcttggacatttcttctgccagatactctaaataatctctctcaagtttaaagtcccacaatctccagggaggggcaaaataccaccagtctctttactaaagcatagcaagaaccagtttagctccagtccccaataagttccttatcttaatctgagactacttccgcctggaattttgggtcaaagccgttcaacaagtctctagcaagcttcaaacttttccgcatcttcctgtcttcttctgagccctccaaactgttccaacctcttcctgttacccagttccaaagtcttttccacattttggggtatctttacagtagtgcccactaccagtaccaatttactatattagtccattttcatactgctatgaaaaaatacccgaggatgagcaatttatacagaaaaggaggtttaatggactaacagttccacatggctgggcagacctcacaagcatggtagaaggcaaaggaggagcagaggcttacacggcagcatgcaagagagtttgtccaggggaactgccatttataaaaccagcagatctcatgagacttatttactattatgagaacagcatggaaaaaacctgcctctgtgattcaattacctcccactgggtcccccccacaacacatggggattatgggagctaaaattcaaaatgagatttgggtggggacacagccaaaccatattacatagtattcaggcttgttttaggagttagaaaaagaggaagagggaactgatatgtatgttgtcagctcagctcccaagaagcacaattctgtagaatatgccaaagacatcacaaggttagcagttcaattcttcatacaaatggatgccataatttagcgccttttttttaaccagccagtaaaaactctcacttgcaacacaaagacaatcttcaaggcatgcagttgccttctatttctaataatttctgaaacatggtagtgtattcacgattttatttcagattccataactgaaaatcataacaatagaatagaaagttcattttcacacaatgcctagaattaaataatggcaaattaactaaatatatagagcaagcccaaagaagagtaagaaaaatactagacaataacaataatgaaaacagtgctatgtgtgatgcattgtgttgagatctttatacatgttgtatgggtttcccattgctggtgtaacaaattactacaaatttgatagcttaaaatgacacaaatttattatcttacagttctgggggctagaagtctataatggttacagggttgtgttccttctggaggatctaggggggaatctgttctcttgccttcttcagcctctcaaagctacccccattccatggctcatgggcccttacacactctgacctctgctttaatcatcacacctcattctctgaacttgacccttcagcctcccttttataagggagggtccaattcagagaccattttacaattcacatggaagtcttgtgaattgaatggactcacccagataatccaggatactttccccatctcaagatccctaccttaataccgaagtcctctttttcttgtaacatattcccatgtctggggattgtgacatggatgtctgtggggaccattattttacctaccacacatggatattgtggaaatgatgtattatttctggccctgctgtatatccattttgacctttgttacctattgctttgaaattctcttttcaatattaggggaggggagtaagccaacttaattactggatattcagggaacaggaatgatactactttaccaagatctttgaactccatcccaacaaatctttcttccacgaatctaacacatcacaacactgattccaacataaaaggattaattttaatttccttttccattcaattccaacatgcatgtttcttgcaaaggtgcaaatgagctgtgaaatggtaggattactagaaaacatttctgagagaagcaacattctgaagaattgattcacagggaagataataaaattatggctacttaaggggaatatatttctacttgacagacaatgggattgtaactattgaattatctctgagaagaaagatcattacagggaaatcatgacaagatgatgtctttcagcatcctgcccaccatcttacatcagtacagctgtgctttaacttagagacatggtattcatgctgcttttggggaaaaataaagcataaaattacctagaatcctttgttatgaggtgtcattttctattatgctttgtacactgacatttcacaataataaaattctaagtagtcatgcctctgccttcagggtagctaaaccatgattgaatgaaatttacctactaaagtctggttttctgaataaaagaggtcaggacatagacccgtactctccaaatttcatgttctagtaaaatcatttaaatgagatgtagttgtaacatatgaaaataactctatgtttccattttgtgttacaacaatggattttgaatctcatatttcagacctcagtcacaaagataattttatacatttttgtaattatgactggggccttgcccaggctaattaacctagtttctcttcttctactaaaggccagatcttcacaagtgtcctgggacactctgcctctcctctcctcagggactttaactctcgagttattatgtcttgatcatgcatctttaaattctccctctcagctggataattttctttaggaggcacataacctgcactatcaccaacattaaaaattaaaacaaaactaaaagataaactttcctttgatgcctatctttccaatacaaattttctccattcctttatagccaaatgctgtcaaaggattgtctatacccacagtgtctactctcttttgttccattcagcatttctttgtcactatcatacacactttagacaataagaaaaatatagagaaaatttagtagtaacttgtgtaattcctatccacttttgtcaaatcccaaaactttgggaaatttgtttcacaatttttaaaagtaaaataactggttaaaataaacccctctctagcccccaaatcccattccaaggtatccgtgatattctgaatttgtatctactgcttattatcaaggtattaataaataagacatagggtgtattaggccattattgcattgctatgaagaaatacctgagattggataatttacattttttacagaggaggtttaattggcttgtagttctgtaggctgtataagcatggcaccaacatcacttggcttctggggaggtctcagggagcacttactcatggcagaaggtgaagcaggagcaggcacatcacatggcaaaagaagaagcaagagagagttagagcaaggtgctctacacttttaagcaaccagatctctcaacaactcactcaccactgtgaggagagcaccaaggagctggtgctaaaccacttacaagaaatccacccacatgatccaatcacctcccaccaggcctcacctccaatactggggattacaattcaacatgagatttgggtggggacacatatccaaactatatcaactatattgtagggatattacacagttcttaaatctcatgtaaatggcattcttctgcagcttcctttgttcacttaacaatatgtttttgtgatttttttccatgatgatgatgatatctatctatctatctatctatctatctatctatctatctctggcttactcattttccactgctgtatagttttctattgtttgaatttgtgataatatacttatgctttctcctctagaataatatacaggttgttattaattttgctgtatgaaaacaaaccatgctgcaaaaaaagttcttgtaaattttcttaggcattactctagtgagaagaattaacaggttgtagaatatgtgtgcattcaagtttactaatcaacttaacatgacattgcaaagtacctttccaaggtgaaaacacttaggttattgtcttccttgagactacaaaactcaccatgtttcccctgctatttttaattttggattgagaaattatcttcatcctggctttatcagtgagaattctctgctgccagaatggagggtgtgtcaggtactcaagtgtatcatccgccagaaacaatttttatgttaatttcccaaatttcttagtttagtaaattcatatccctaaatccacaatatagtgattataaattctcaggtgagatccctccctcccccaagacccattagagacaggcaagatttcttgttgttacatatttttctcctaatccatgtgttccatgaggggaagctttttgaggatcattgcattatgcaattttgggttttattttcaactcactttaccatcttcatagccttctcttttgttcctgtgtggttttccagactaagccctgttgttactgaaactggcaagctcactgccagggcagcgacaggatgcatctgtgtttgcctcctaggtatttccctggccttctcagaaattagcccttcttttcaacaatatttgcaatattttattcagcattttgtagcacaagttagattcatctatgacagactttgtagcgcaaggtagactcatctattgtcagagagtacatacaatcaaaaaagatgtcaagtcctaatttttctctctagctagctttctcttttaaactctacctgacttacacatttagatgagagaatgtgttgtctaagtggaaaagtttaacatgttgagtttaacttatccaaaagtagactcttttaacatgtcaagcttaatatatgcacagcttgtctcttggctctcataacgtgtgtactagttaggatgctccaggaaatcagaactaataggaaggatggatggatggatagatggatagatagatagatagatagatagatagatagatagatagatagatagataaaaagatggagatttattatggaaattgactcatgtaattgtagaggagcagaggtcccacaacatgctgtctataagctggagatccaggaaagccagtggttctgttcctcccaagtctgaaggtccaagaaccagaagcactaaaatccaagggcaaaagagaattgatgttccagctcaaaaagagagagagagaattgatctttcactgtcttctcattctattggggccccacaacagattggatgatgcctgtctatattggtgaggccttctttattcagtccacttatgcaaatgctaatctcttctggaaacatcatcacagatacactgagaaataatgttgtatcagctctctgggatatcccttagcccagtcaagctgatatcttgcttctctttttctttgtcacttctgagtcaatgttgtcataatctacctagttgtttaggccagaaacatgagtgtctttttgactatacacttatctctatacttgatgtattaccagttgtactagattctttcttaaaaacatacatgctggttcctggtctgtctgaatttttcaggcctcaatgtaagctggcttccagtgggactttgtcagtgggaatcactatagggtaatcgacagtgggagagacctataaatctcgtcttgagcggtattctttgcaatagcttcatcacctccctggtttcagctccctctggactggcccatcatggttcccacttctaccaaatgactcagccttggattctgctagtatcacttcctacctttagtcctccagccttagggtggtggtttcttgatgttatttcattgtgtcaccaccaactatgtttaacttcttttccattccattgtagggaaaaccaattctttgtattaatttttctcattttaagttacttagagtggattctgcttttttggttagactctaactggtacaatatattcccccccccccggattattgccagggagccttccaacttgtatccttgctttcattctcaactctccaatctactcgtattactgtaaatagctcatgtcattggattttcactgcgtttagaatgaaacatgaattgcctaacaagaattataggctcacctacaacttttcagtctcagtctataccacacatccccgttcaatatttggtagctctgctgttgctggtactttttcttctactgaaaatgacaagcacttttctacttctgaaaagtagaaaactttctacttggcacatacgatgccctctgcttaaaatgctattcgcctctgagtcctaactgaaggtgattcatcttttgggcctcagtttgagtcacctccttacaaatatcttttttttttctttttttttttttgagatggagtctcgctctgtcacccagactgaagtgcactggtgcgatctcggctcactgaaacctccacctcccagtttcaagagattctcctgcctgagcctcctgagtagctggaactactggcacgtgccaccacacccagctaatttttgtgttttttgttttgttttgttttgttttttagcagagacggggtttcactatgctgtccaggctggtctcgaactcctgacctcaaatgatccacctgcctcggcctcccaaagtgctgggattacagctgtgagccactgcgcccggtccctcacaaatagttgatcactgaaaccaaagtacacccgcttgttaccggctttagagcaccttttgcttcctcgagtgttatcacagtttgaaattatctactcacttatgaattagttggttcagtgtctttctccagtttgggagctctgtgaatttggactcgggatgggtctgtttcccactgtatcctgtgtccccagcagtgtctgacacagaagatgctccatcaatattcgggaatacatgttaaatgcaacaatagagggattcttaacgtttattttttcaagcacattaataaataattagtttggatttgaaattgaacacactggagaatagttcataattgtgcccaaactggatggcatttttctcaccgacctgaggcaggatttgatttgccttcaggttgcctaagcagcatgctttgctcttttgcctgggtgctcttcatgaactcttgcatttgatacctttagaaagtaaaataaaacaagagaagcactggagcgaactctctttaaatgcgaaaggattttctgggtcgaaaaagaggcctttttcaagaaatccccaggaaagcgtggtttccttacccatttccatgattcttcttctcagcaggctctcctaaaaatagttgccatctgtggctaagagcaccgcagactgcaggccccgaggcgcagcaaaggtgggtgttcaagctagaggctggcatgcaggtctggctggaaggaagaaactatcaataggctgaacatcaaataaaacgagccgcgatttagttaagaaattccatttaaacatcagacacatgcaaagacacctttaggactcacataaaattttatttcttaccgatatccttccttgggcacagaagaccaaatataccatgatctataattatctacctttctttctgtttgaacaatggcttgttgcctagaaactggggtgataggtatgccataaatacatgctcgaaacagctcttttttttttttttttgctggatcaatttttttttcatactgcttctattgttatgaaggttcattaaaatacattcgtattctggatttgtttgtttggaataagtacaaactgtgtatgcccaattaagtatgaataaaatattacagtttcatttgcctttcaattcattatctgacatgacttggcttctatggaaaacaactatttgtgtgtcatggaagagtacacagttaaaaagttgtttatctagcactctatcagctggaactcttctaactgataatttctcccacatgtagtgcaatgaaaactagtatttataatgatggtattgaaaaacaaggaattatcacaaaattagtgaattaatacaatctcataattttatgtacctgagaactgagcctctgacagatgatctgcccccagatgtcatggttagtgatggctctgggactggaattggaattttctgatacccatgccaatgaactcaccatcttatccccttgcctgaaatttccttccatctgcaaaattttgattctaaacgtacagatctgtcagtgccagaaaatgatctctctgtgttttttttgtttgtttgtttgttttgttttgtttttttgagacagaatctcactctgtcgtcaggctggagtgcagtggtgccatcttggctcactgcaacctccacctcccgggttcaagtgattctcctgcctcagcctcccaagtagctgggactacaggtgtgcgccaccatgcccggctaatttttgtatttttggtagagatggggtttcactatgttggccaggatgatctccatctcttgacctagtgatccgcccacttcagcctcccaaagtgctgagattacaggtgtagccagcgtgccccgccctctgtggttttctaatgtcaaaagcactttttaaaattttaaatgtttaaaatttacatttcaatacctttttggggaacaggtggtgtttggttacatgaataagttctttagtggtgatttctgagattttggttcacctatcacctgagcagtgtacaccgtacccagtgtatagtcttttatccctcagcccactcccaccatttcccctgagtccccaaagtccattgtatcatttttatgtctttgtgtcctcatagcttaactgccacttatgaatgagagcataaaatgtttgattttctattcctgacttacttcacttagaataatggtctccaattccatccagattgctgcaaatgccattatttcattcccttatatggttgagtagtattccagggtatatatatgtatatacatatatcacattttctttatccactggttgattgatgggcatttgggctggttctatatttttgcaattgcaaattgtgctgccataaacatgcatgtacaagtgtcttttttgtataatgtgaatgtcaaaagcattttaatgtctcagtcctttatcttgttagtcacagtgattgttcatgtaataaactctgatgacaaatccctttcaagtcttctacataatcagaaatcagttatactgaatattagttttattttttaaaccgtcattatattacagttgtccacaaacagaatagataaaagtgtatggaagtcaggaagtgtagtaatcaaacactcatgcattcaccgtaccaggtaagaactagcatataatatttgttgaagctacctttgtgttcctcctcccctttggggttaagtaaatttgtcattcttgagtcttcaaaaatgtctatatgtatagggtacatagtaactctacccagtgcaattaaacaggaaatattcctccattacactgtattcatgcactaatttatgcactgaaactatcattcatttattcaatccttaataccaatgttaaagcactgcttcagaagatatggagagagattatactacattaagtaatataattttatgcattatagaatagagtatgtatatgtataatcaatatctatattttttctcaagatattttaactattatcaaaggctagatgttcaacaggacattatacatttctttgatttttaagtactaacattaataatatccatcaattattggatgcttagtccatgctaggcactctatgattactgtctcttttaatattatgacaaccttttgatgtagtttatcatttggaccatgtgaatgactgtaacaagcatcgcaaaatctcagcagcttaacaaagagagatttgtttcttactcatctcgaagtcccttttctttaagcagtgattcagggatccaggcttcttcctttggaccattggagccaaagggctcatggaacattttagaggccaggtctggaaatgacatgcacctgttctgctcacatgccattgacctgaattaataacagcatccacgtggttcaagttaagctgggaagtgtagtctacctgtgtgcccaaatagaaaataaaattatttggaaaactcatagtattttctctgccacataaataaaattaggtgctgtctttattattaatattttcaatttatatttgagaaagtcaaggcttaaaaagataaaaggacttgctcatggtaggtaaattgttgagctaagattctcagaagacacatccttacctactacacaatacagtctcccagctctttcttgaacaaatcaatgttcattataccagtggtctatattgttgtaacacattgcaactaataaggaaaacatgcatggatttcctttagaaattaaatgattgcttaagtatttttctaaaataaaccagcatacctacttcttgcatattttattttctgagtcattggcttcgagtaaatgattttgagtgttcataaatcagatgaaaacaaattatttgttttaactgcatcagggataattaattattggacaatttgagctttttaaaattttgctttgtggaatttagactcagagttaaatataacttcccttaatgatgactaaattaaacgaaattacaactgtcttatctacatggataattgggccatccacatgaggcacttccaattctgaattaatcatctattgctttttttcataagctatgttgatattttaccacgacttaggactaactaaggtggtaaattaaaaatctgttttttcattttgatgatagctctacacaatttctatattggtgcaaatgttgagttcttacatttagttggaaatattttttaaataacttcatatgtaaatgttatatggaaccattctccttcacctaggaactatatggaatgtcccaactccttaatattctcaaaatttttggcaccaagaaaggataatcagaaatgaaaccaaatgttgaggtaaaaatcaaataagcactatgtccctgttctctcttttagtggagttgttcaaagtatcacggtatttgataagcccaaattcatgatgtaagttttgaaataattatcagtgaacagcattgttctctgttatgatttatagagttgctctgaagtttttgttttgttttgttttgttctgtttggaagggagtgtgataaagagagcacttttgtccctaacttgctgtagagcttttcaaaaattgttaaatgtcttgtaggatgctttgttggcaagcatgagataactgtattgacttgtgtgcctcagctccagagaaaacaaaattagtttactggagcaaaaaatgttttgaaaatttatataaattctacaaagaaatgtctaaaaacttctgattttgcactggacacctctcagccaaaatggtagaatggtcaggggttgaattgtgacccccaaaaagatactttgaagacctatcccatgtacctgagaatgtgaccttatttggaaatagggtctttgcagatgtaatcaagttatgatgaggtcattaggatgggccctaatccaatatgactgatgccttataagaaaagggaagactatatcaagagaaacacacaaggagagagcaccaggtgggcacagatgtagagactgaaaccatgtagctgtaagccaaggattggacaggattgatggtcgccatcagaagctaggaagaggcaaggaaatattctgttactggaaaggggtccagatccagacccccaaagagggctcttggatctcttgcaagaaagaattcaggacaagtccatagagtaaagtgaaaacaagtttattaagagagtgaaagaataaagaatggccattccataggcagaacagtcccgagggctgctggttgcccatttttatggttatttcttgattacacgctaaacaatgagatgagtggattgttcatgcctcccctctttaggccatttaaggtatcttcctgacattgccatggcatttgttaactatcatggcgttgatgggagtgtagcagtgacgacgaccagaggtcactctcatcaccatcttggttttgatggattttagctggcttctttactgcaaactgttttatcagcaaggcctttgtggcctgtatcttgtgccgatctcctatctcatcctgtgactttggaatgcccaacctcctgggaatgcagcccagtaggtctcagcttcactttacccagcccctattccagatagagtcactctggttcaaaagcctctgatatttctatccaaagactcagagggagtgtgcccctatgagtgccttaagtttggacttctagtcttcagaactgtgcaaaagtaaatttctgttgttttaaaccacccagtttgtggtacattgttacaggagttctaggaaacacatacaaatggctgcaagtcaaacatgcaaaagggaaagctgtttttacttatttgcttctcttttctcttggggttggaggagaatccctgccatggagccagcgacctagggcctgagagtgtggctttaggcccttgaggtggtgcctcaagtaactccatggaagtcacaaaaatcaagtagattaaagacctgagtgtccccccgcccctccgcatgttcttatgataatgggagtggagttggtgatcaggtgggctgtttgttacaacaaagtatttgtagaagataaaaggtttgtaaaactaagcaatacatcttttcttcaacaaaccctgtctcactttctgttatgtgcctgtggtcctctctactgcccaggaagctgggtcattccactttctctgatctaagagaaattgcagagatgaaggagggcttggcagttcggggactagcagccggtggtcagcatcagaaccagtaccatcaaaaaactgcaatgatagttgtcaacactaggtggcaccacagcaaagcctgcagacgccccagtctccaaggagtgccacgcatccctgtgctaggaagttataggaattctccttcatctgtgcgtgcctcttgctttcagtaacctacacctttcctttcaaacagaagtgatgcctacctgtggactaaggcagggttcagccttagaatgggctcataattcctagagaatcatgatcctgtagaagcaggtgaaagcaaagacacctggatgaaaagttgagtaaaaaagaaagcaccaatacctgtgctttgagtcacttcacgatgtccccaccgcctccctagctaagacagccctgccactttccctgccctcccccacttttgtatgtccaattgaaccctttctacaaaagtcccttgagaatgcctgttgttcttctgaggatgctgttaatactcactttagacatcaccaggaggcacccagtgcggctggctccatctcacaaaatgtgacttctgcgatccccatccttctttgtatttctggaaacacatgaactgtacattgagttggtaagatccttcctggaacttactcctgaccacatgatcaaagccctgtgtagttttcatggtataaggcaataactcttacttaaatttattggttctttttatatacaagagaacaggtcaactgcaacctgtgttttaagcacattcaaaatacattataatttgttttcatttaactgtcatcaacttaggtgaaagtcatcctttttaagacctttgatttggaaggagttttctcacttgtgttacatattatgccttgcctttaaaggtagtcttcaaacaaatataataatgaaaattggtttgtattaatgtagtggtaaaaatttaggtctaaggagacagatgaattaggtttctcgagtcaatttgaatgcaacaaaaaaaatctaggtttcttatttataactcctgcattttacaaatctgtccatttgaagctgtgggcttacataaatctgtcacttggtacatcaaataatctgggattgcttacaatttaaccattaagatcttttctaatgcagctcattttttagaaaatcgtattcaagcatagattgctgggttttatttaaaattaagatttttaagacacaatattctcttttatttcagctttagatcccttccccaaacagtaaaaatgctcgcataaaaataaaatattatgaacagatttagtggcagctgattctgggttaaatgctccaccttgtggttgaataaggaaatttactttttaactttttatttaatgatgttaatatgaaagttgtcttctctttttgtccttggaagacaaagagactgctgctgctgatggtgaaattatccataatgtgtatatagattcaccaagaagatatgatttggtggcttcagaagccagatttcggggtacaccagagactcagcaattgacattggtgccatctggtaaaacgtgaccaaaatgaaccccaagttagtaccctgaaggttttaccctttgtgtagaaacgtttcctaagtcattctacacaataaattaatactacacaattaatacctgcacatatagtccagaaggaaatgaaatggacaggtgcctgtgtgcgcgcctgtgtgtgtgtgtgtgtgtgtgtgtgtgtgtgtgtatgtgtgtgtgtgtgtgtgtaggtggggtaaggggataggaaattacagctctgagggtgaaactaatttagttctattttcagaagcctcaaatctccactcccacttctcttgcagtatgcaggaaggaggctggatcccatcaatacctaaggaaagctcactatcacttgctttggaaaatggaaaattccattctcatcagctttctgcagaacctggagccatctcagccaaccagagttctttcatcgagatgggccctacagatgctttctcctttcttttcatcctaaagaaatgctaccctcatatctgtttttacttccataagcttatttttctttttgtcacagaacttcgtaggtacattttagggcacattaaattttagctaatacttattgcttccgaaataatatctgttctggttttcaattggccattcttgcattgctataaaaaatacctgagactgggtaatttataaaagaggtttaattggctcatggttttgtaggcagtacaggaagtatggtgctggcatctgcttggcttctgtggaggcctcaggaaacttacagtcgtggcagaaggcaaagcaggagcaggcacatggccagaacaggagagagagagagtcgggggtgaggtgccacatacctttaaacaactagatttcacaagaactcactcagtatctcgacaagagcaccaagaggctggtgctaagccattcatgagaaatccacatccatgatccaaacacctcccacgaggccccacctgcaacactggggattacaattcaacatgagatttgagagggaacaaatatccaaattatatcaccattgcattttattgttttctaccttcagtaaaatagcttctgacagcaaaatgagtcacactagacctcctgaatttaaggagaaaggtgtgtggtctattaacatttgtgtattttgttgtcctttccttgaaagtagaagattcagaaggaagtcccaggcctcctagtcccttccccctgtctttgcaaagaggatgaagacggtaatgccccatctcagggaacatgttcctaacagccagtttaaaacctttaacacagaaagagaaagaaatagttttgctgaattcatttactagtaatattttaaaagcagtgtttaggccgggcatggtggctcatgcctgtaatcccagcactttgggaggctgaggtgggcagatcacaaggtcaggagttcgagaccagcctgaccaacatggtgaaaccccgtctctactaaaaatacaaaaaaaaaaaaaaagaaaaaaagaaaaaattagccaggtgtggtggcacgcgcctgtaatcccagctactcaggaggctgaggcaggagaatcgcttgaacccaggaggcataggttgcagtgagccgagatcgcgctgctgtactccagcctgggcgacagggagagactctgtttcaaaaaaaaaaaaaaaaaaaaggtagtgtttaaggtatgtcacatatgtagaacatcagaatgagaaaatgatgacagtgggcaggctggcgggcgactgcagatgaaatgtggtgattatgaaaagtgtagcatctctagagccttaggcacatgcctggttatgtgttaagagctattcaagaataagctgttctaataatcacaactctataagatggggctactagtgtccccataaaatataaggaaactgagacatggggtcattgtcacacctccctaatgtcatatggctggaaagtggcaaagtcagaatttgaacccagggtccttctgcctccagcattcatgttcttcatctcaacactctcccagattttgtggcaacagttgaaaatcaatattgccctaaaccactgtaatttcaacaaagatctatgaacacctatcatgtgtcaggcccgtgatgaactctgagggcactgagatggatgacctggtcccagctgtccagcctctggtgagtctttttcagcctgtgaacacagctgtgggaaacctccaataccacacacagcttttgcccaccgggcaggcccaacaaatggcgtctagacaccacataccatagagccgctgccttgccagccatgaggtcacacaacgcactagtccacagcacgcaagctgccttggcggcgtctcaggcctgctaattgggacaggtgcagagtgatgacagcgggccacccacagagctctggcacactggcaaagacatgaggagcgggaggacaggaagaagagaaagcctgaactgcagcctgggcagtggtggctggcagataaaaacatcctttatgcaccaagaacttggctatttttggaatgggcattccctaatctctaaagcaaatggtaaagcctcaggaaatgagagcctatgaaaatatatgcctacatgcaaccaccagccttccaaactggaaagataatttgcacatatacacacatacacgcacgcacagacacacatacatacatgcacaaacactccgataattctagtagaagctgtggatctttgtaggatgtaaagggaaatgctacttcagggacaaccattttaacaggttcatttcaaatgggtaggtaagaattagaagtaaaaataaaagaaagaccatctcagttacaggttaacagttggttaggagacatcatgaaaatgctaaaggaaaaggagcagatttagaagaagcatgtaaagaaataaagttgacctttctagattctgaagttatcggcagaattgatctaatgtaagtattggcaggaatattgtaggaagacaccaagaggaatgagataaggtcacttgattgcaggaatttatagtataacagggcaaatcattaagaaatgtctaaagttttggtggaaagacgctcatttttatgtgaactaatggatgctaattttctttcaaatgtataactgatattgaatttaaatgctcagctacatgtaacatgcatttctgttacagtctgttaggatctcagtgggactttaagaaataataagacatagaaacatgactcgtaatgagaagctaaacacaaagatagcgtatatgatttatattatgcaacttttttttaaagttaggaggcaatcacaattgcttacttaatctaggtacttgcaattaagccatgagctgagtatcagatacctattcattttctccacatcaaaagttatctgtaggccaggcatggtgtttcacgcctgtaattccagcactttgggaggctgaggtgggtggatcacctgaggtcaggagttcgagaccagcctgaccaacatggtgaaaccctgtctctactaaaagtacaaaaattagccaggcatggtggtgtgtggctgtaatcccagctactcggcaggctgaggcaggagaattgcttaaatctgggaggcagaggttgcagtgagccaagatcacggcactgcactccagcctgggcaacagagccagactccatctcaaaaaaaaaaagaaaagtcatctgtaaatcagatattcttagaacattttaataagtcacctcctttatttcaaaagcttatgctttgcaacgtatttatcaaaaaatacctgacaactgcacttccgtttggatgttgcaagaataaaattaagataatattcatgaagtcttctgaggcccttattatagatattttagataaatgtttcattgttattagaagctaaagcaatctattaagtgcccatggcatttattttttaatcgtgaaaacttggaagttatttggtttctgttgtaattttaatagttacatttgtaacacaaaagataaagaaaatttatttgttaatgtttgcttgtgtgtgtgtgtgtgtgtgtgtgtgtgtgtgtgtgtgtgtgtgtaggatgacttatgccccgcaaagatattcagctcttagaccctgtatccctgtgtaagttaccttatggcaatagggattttgcagatgtgattaagttacagatcttgagatgcgaatattattttgaattattccagtgggcccagtgtaatcaccacaggggtcttcataagagggagaattagagtctgcagcagacagcaccatggaagcaagaggttgcagtaatgttaagaaggggtcatgagccaaggaatgcaggcagccgctggaaactgaacaagagagaggaatatcttctcccctggaatctgtaagaggaaccagccctgattgcaccttgaccttcatccagggagactgactgtgaacttccgacatccagaaatataagaaaataaatttgtgctgtcttaagccactaagttggtggcaatttgttatacagagccccaagaaactcatagtgtgtgtgtgtatacattcatatactcaatgatgtctcagataataaggtgaatcagatcagctgtccctttgattgaattcaaagtcaggtttttttcaatgattcattttttttaaggcattttgacatactgtagtatggtttctttttttttcttttttgagacggggtctccctctgtcacccaggctggactgcagtagctgggtctcagctcactgcaacttctgcctctggggttcaagcaattctcctacctcagcctcctgagtagctgggattacaggcgtgtgctaccacgcccggctaatttttttttgtttttagtagagacggggtgtcaccgtgttagccaggatggtcttgaactcctgacctcgtgatccgcccgcctgggcctcccaaagtgctgggattacaggcgggagccaccgcgcccagcccaaagtatggtttctataaaagtctaaacaaaacaagggtcagctctttttctcaaggacattattatttgctgaatcttccaccattactgtactttagagaccatgtggaattgtttttcactgggagaaggggagtttacttatttagggtaatattggtgtaaaagaatgtagacacaagcaagcagttactcaatctacaattgtaaagaaggctgctaatgtcaccataaagtggctgggtcctggattctttctgccagcacacaaaatgaggataggcaactctcagggcaaattgaaagttgacaaggtttgtctgcaggaccctcccagacaccttttctctacatatcttttaagaacaaggcctgcacatttcttggttctaatatgcaactccttttctgttaaaatggagagtatgatattatatttgcattcatacagaaactaattgataatgagagaataggttaaactttaatttgcatttataattcttaattatggagtattttgaggctatgattagcaatagaagaaagctggagaccttcatgtggtgatgttgggcataagactggtcctgaagcctgctcatgtcatttttagagtaccttggtggttttgctcaaaagatgcaaaacattctaaagagtgacaacagtcctcttcccgtggtatattcatgtaggctagcaagagctgattgtgatatatccaagaatttaaaaatccagttgttacacaactggtagctgaagacaactatagggagaacatttacaccacagaaattggcaaaagctctaactcagggcttttttccccttccccttctgggatggcttatatgctcattatagtttacttcctgttctctcttaaaaataatctttcttctgttctccctgagctgcaagacttttcaccagggactttgagcctaccctcactgtaatttcttttctgaccgctgctatttcttggtcagggctggctcaaccaataggtgcagtagacacagcgtctagggcccatgatactttcaggggcccaagaaatatttaatttctttccaaattatatgagaaatataaatataatagcacatgcacatatgtaatataacatatatgtgtatatatgtaaaatgtgtaatgtataatgaatctagcccatattatattcatctacataaccaacacattcataaagtacaatttctggtattttgttatggaggaaggagatcacaaagacaaggtgcctagggcccacagaagttataatatggcctcccgtaggccctcttcagcctcagtccagagttgacttaaagtaagtcttgttttttcaggatgcacttttataaaattcacctatatgctataatgtatattggcagcaccacttcagatgcctgggggataggcactacattacccttagaagcccgagttaagttcatgtttgcatgtgcttttaaatatgtctggttttgattaataccatcttgtatttgtgattctttcaaaagatggaaaaaacagcaaaaccaatatatggattccaatgaatggaacatctgctacctttgttacatatttcatatttggtatgatttggctctgtgtccccacccaaatctcatcttgaattgtaatccccatgtgttgaaggagggacctggtgggaggtgagtggatcacgggggttctcatgatagtgagcgagttttcacaagatcttatgctttaaaggtgtttggcagtttctctcttggcccagtctctctctcttgccaccatgtaagatgtgccttgcttctgcgtatgccatgattgtaagttttctgaggtctccccagccatgcagatctgtgagtcaattaaacctcctttctttataaattacccagtctcaggtggtatctttgtagcagtttgaaaacagactatacaatattcatgcttagtttcctacttgcttgtaatcattcaatccaatagtaagaattttaatgaattattctccctttgctattttctagtttattcacatgttccctcagaggtttaggtgttttttttttttttttgtttttgccttttggtcttttcttttctttttaattttttttttgttttcttactttttatttatttatttttttggagagccaatagataatatatatttttaaatttattgcaatagctttaggggtactagtggttttggttacatggttgaattgaatagtagtaaagtctaagaattttagtgcacctgtcacatgagtagtgcacgttgtacccaacaggtagtttttcatccctcacctccctctagtcctccccacttctaagtctccattgtccattttaccactctgaatgcctttgtgtatccatagcttagctcccacttatacatgagaacatgcagtatttggttttttattgctgagttactttacttagaataatggcctccagttccattcaaagttgctgcaaaagacattatttcattcctttttatggctgactagtattccatggtgtatatgtataacacattttctttatccactcattggttgataggcacttaggatgttcccatatcttagaaactgtgaattgtgctgtgagaagcatacacatacaggtgtcttttggatatagtgacttcttttcctttgggtaaatacccagcactgggagtgctggatcaaatgatagatctacttttagttctctgagaaatctccatactgttttccatagaggttgtactaatttacattcccaccagcagtgtataagaattcctttttgcggctgggtgcggtggctcatgcctgtaatcccagcagtttgggaggctgaggcgggcagatcacaaggtcaggagatcaagaccatcctgactaacatggtgaaacctcatctctactaaaaatagaaaaaattagctaggcatggtggcgggtacctgtagtcccagctactggggaggctgaggcatgagaatgacatgaacccggcaggcggagcttgcagtgagctgagattgtgtcactgcactccagccagggcggcagagcaagactccatctcgagaaaaaaaaaaaaaaaaaagaaaaaaaaaaaagaattcctttttcatcacatccatgccaaaatctattgcttttgactttttagtaatggccattctggctggggtaaggtggagtctcattgtggttttaatttgcattttcctgataattagtgattttttttccatacatttgttggccatctgtatttcttctttttagaaatgtacattcatgttatttgcccatttttaaatgggattatttgttttttttcttgctgatttgtttgaattccttatagattctggatgttagtcctttgtcggatgcataattacaaatattttctcccattctacaggttgtctgtagattatttcttttgctgtgcagaagctttttagtttagttaggtctcactcacttcttgttgtttttgttgcatttgttattgggccacagtcatgaattctttgcttaggtcaacgttcaaaggaatttttcctaggttatcttctataatttttatggtttcaggacttaggttaaaatctttaatccagcttgagctaattattgtgtatggtgaaagatagacagagattcagcttcaattgtctacatgtggccatccaattttcccaacaccatttattgaatagggtatcttttccccaatttatgcttttgtatgctttgtcaaaaattagttggttttaagtatttggcttaatttttgcattctctattctgttccactggtctatgtatccacttttacatcaataccatgctattttggttaggatagccttgtataatttgcagtcaggtaatgtcatgcctctggatttgttcctttggcttcagattgctttgactatttgggctcttatttggttccctgtgaattttaggattgttttgtctaattctgcattagatctgtagattgctttgagaagtattgtcattttcatgatatagattcttctaattcatgagcatggaatgtatttccatttgtttgtgtcacctatgattactttcagcaatgttttgtagttctccttgtagcaatctttcacctcctcagttaagcgtattcctaggtatttgatttaattttttttagctattgtgaaggggactgtattcttgatttaatttaattctctgcttggtcttgctggtatatagcagtgctactgatttgggtacattgattttgtaatatgagacatttctgaatttgttattcagatctagcagtcttctggaggtatctttagagttttctaggtataagacaatattatcagtaaacagagacagtctgacttcctcttttccaatttggattccttttatttctttctcttgtctaattgttctgactaggacttccagtacaatgttgattagaagtggtgaaagtgagcattcttgtcttgttccagttcttagggggaatgctttcaattttccccacatagtatgatgttggctgtgggtttgtcatatatagcttttattatttttaggtatgttgcttgtatgcctaggttttgagggtttttattgaaaagggatgctggattttaactaacgctttttctgcctctattgaaattaccatgttgtttttgttttagttctattagtgatgaattacatttattgacttgtgtacgttgactcacccctgcatccctggaatgaaatccacttgatcatgatgattattttttaggatgtgcttttggatttggtttgctagtattttattgagaaattttgcatctatattcatcaaggacattggtttgcaattttcccttttttttttttttatgtcctgacttttgtatcagggcaatattgacttcatagaataaattagggaggatattttctttctcaatattttggaatattttcagtaaaattggcactaattcttctttgactgtcttgtagaattcggttgtgaatccatcttgccctgggacttattttttttttatttttttttttgagatggagtctcgctctgtcacccaagctagaattcagtggcgtgatctcggctcactgcaacctccgcctcctgggttcaagcaattctcttgtctcagccttccgagtagcggggactacaggcgcacaccaccatacctggctaatttttgtatttttagtagagacggggtgtcaacatgttggtcaggctggtctccaactcctgacctcaggtaatccacccacctcggcctcccaaagtgctgggattacaggcgtgagccaccgtgcccagccaagcttatttttttgttggcagttttttcattattgattcagtctcactgcttgttattggtctgttcaggattttgatttatttctgattcaagctagaggggttatatgtttttaggaatttatccatttcctctgggttttctagtttgtgtgcacagaggtgttcataatagacacaaatgaccttttgtatttctgtggtgtcaattgtaatgcctccattttcatttctaattgagcttatttgaatctttgctttattttcttcattaatctagctagtggtctattaactttatttttttagagaacaaactttttgtttctataatcttttgtatttttttgttgcaattttgtttggttttgctctgctctttgttatttcttttcttctgctagctctgggtttggtttattcttgtttctctatttccttgtggtgtgacattaggttgtcagtttgtgatcttttcgactttttgacgcagacatttagtgctacaaactttcctcttatcacttcttttgctttattcgaaagattttgataatgtgtcacttatcattcattttgaaaattatttacattcccatattcatttcattgttaacctaacaatcattcaagagtggattttttcaattccatgtatttgtatagttttgtgggttactttttgaattgatttctaattttattctgctggggtataagaagatacttgatatgattttgatttttaggatatattgagacttttttaatgggccactatgtggtctatcttggagaaaggtccatgtgctgatgagaaggatgtgtatcctgtagttcttgggtagaatgttctgtaaatgattcttacattcacttgttctagagttcagtttaagtcctgtgtttatttgttaagtttctgcattgatgatctgtctagtgctgtcagtggagtgttgaagtaccccactattactgtgttgctgtctatctcttttcttaggtctagtagtaatattatgaatctgggagctccagagtaaggtgaatatatttttaggattgtcatatctccttgttgaattgatccttttatcattataactttctttgtcttcttttaactgttgttgctttaaggtttgttttatatgatgtaagaatagctattcctgctcatttttagtttccatttgtgggaaatatctttttccaatctattaccttgagtctacaagaatccttacatgttaggtatgtctcctgaagacagcagatatttggtttgtaattttttctatccattctgccaatttgtatcttttaagcagagcatttagaccatttactttcaacactaatattgagatgtgacatactgttccagttatcacattgattattacctagtgactttgttttattttttgtgttattgttttataagccctgtgagttttatgctttcaggagtttctattctggtgagcatcaaccttttgtttcaagacttagaactaattttagcatttcccgttgggctggtctagtattgacaaattttcacatcatttgctaatctgagaaagtctatttctcctttacttatgaaacttagtttttaaaatttttttaaagttttattttagtttcaagtgtacatgtgcaggttttttctatacataaattgcatgttgtggaggtttggtgtacatattatttcatcatccaggtaataagcatagtacccaagaggcagtttttcaatcctccctctccaccatctaccctcaagaaggccccagtatctattgtgaaactcagttttgttgggtacaaaattctaagctgatagttattctgttcatggagactaaagataagaccccagttcctttttgcttgtaaggtttctcagagaaagaatagattttcctttacaggttacctgatgcttttgtctcactgctcttagaattctttccttcatgttgaatttagatagtctgaagaatatatgcattggtggtgtcctttttgccatgaacgtcccaggagttctttgagctttttgtatttggatgtctaaatctctagcaaggtcagggaagtttccctcaattattccttcaaataggatttccaaacattttgctttttattctccttcaggaaaccagtgattcttaggtttggctatgttacataatcctatatttcttggagacatttttcacttctgattcttttcttcttatttttgtctgattatgttaattgaaaagtctttcctttgagttctgaaatcttttcttctacttggtgtagtctatagctaaaattttccactgcatttcatagttccctaaatgtatctttcatttccagaaattataattggtttttcttaaaatatctctttagaacatttttcattcatatcctgaattgtatttttaaatttatttatgttggttttcaccattctcttgtattcccttgaataacttaataatcaaccttttgaattctgtgtcgcagatttcaaagatatcatcttggtttggctccactgttgggagtaaatgtgatatttggggctgatatagaacccgattttttcatattgccagaatcatttttcttgttccttctcatttacttactttttttctaattatttttgaatttactttttatttgactgggttttaaatttttgttcccccttgaggatgagactttaacatttataagctgttgtcatctacctttggctgtaggtgttttcagtggtgaagactttgtgtgagttttcagttgtagaaaatctttgtgtgatgaattgctctgatgaggatttagtaatgatatgctggatgtgtgagcagattcactgtctcctgtggggctgaagtggcagaggtctcaggaagcttatctcatttcccagtggtgtgcacttttataaatgttttccccactgttttactcactgggttgaacagttcaggctttgggccattaggaggtgcccatgaggaaaaactggccaaggataaagcagatgggtaagttcaataccccagtggtgaccagaggtcccagctggggaatctctcagtgaaatgcactgaggtcttttcagaaggaagggagaaagccaccatacctccccttcaggaaattcatcccagttacactcttgaccccatgttccagctactcagattagacaaacacctctttatctgcttcatgtagacagggatggtgactctacgtcttgtgcaagccaagcctgaatcaagggcgctcctactgtggggatgcatcctgcagtgttccagaaaggctgtctacggatgcacccatgctaagctcccatgggagacattcagctatgtctggagtggcagacgcgggggagaagaaatcagtattagggttctctaaagaagcagaactaataggatatatgtatataagaaagggagtttattagggagaattgacccacatgatcacaaggtaaagtcccatgataggtcatctgcaagttgaggagcaaggaagccagtggtggatcagtccaagtcccaaaacctcaaaagtagggaagccgacagtgtggccttcagtctgttgttgaaggcctgagggccctggcaaaccactagtgtaagtctaagagtccaaaagcagaacttgcagtctaatgtttgagggaaggaagcatccagcacaggagaaagatgaagaccggaagactcagcaagtcagctccttccaccttctcctgcctgctttattctagctgcattggcggctgattagatggagcccacctagattgagggtgggtctgcctctcccagtccactaactcaaaggttaatctcttatggcaacaccctcacagacacacccaggagcaataatttgcttccttcagtccaatcatgttgacacacagtattaaccatcacaaagtccccttctccaagactgttcatgagcaccagggctgcctaaccgttgaggtagaccccacaaactttccacactgagtccagcactgctgctgtgactgctgaaagaaactttccacagtgaaaaggtagggacccaaggcctgaagtgtggtttcttttgtcccatggaatgctcccttaatgtggtacattccctctttttctaggagtagcagtccctgagcaccagcctactgtgactcctgctgctcctctgggtctaaccacccagtggggctgccatactttgatgctgggaatgtctacaagggatcgagtgatgtgacctgtccttcaagtctcccagcaccagatctgataggggtgagagaggagtcatgtagattctgtgagattccttggttataaatagccttagtgttgtggccttcacaaatgccagctgtactggtcatgtagacagattcaacacctcctggttagccagtgtgaccacagtcatgttagtctctattcaaactggggttgcacagaagttttctcctttgtgagcatgatgttaacggaaccggctgatattgtattgggttgtgtcatttaacctctagccaggaggtggcgcctgcgaaagaccacaagctgtgatagcagcagtggaatttttgcttttgcttgccttttgttacccaaggaggtgctctggtgtttgaagtgatgtgtggggccacggaactttcaaatgtctctatccattgtgttaccctacaaggacaggtggagaagcaaagcccggcgggggtgggtcaggccgtctgtgctctggcttcccatgtggagtcacaagcagctgccccagtggaaatcagaggtcagttccccggcccctggggtaatgttccacagagcagcacagctgcttctgttgcacagaagaatccacatggggagtgaagtgtagcaggtggcggtaagccccactctgctcccacacacttggcaaggcaggtctcacatcagcagtgttctgctagcagcagcttgctgggttccaggcagcctgcagtcagaacttcagattgccccaggccataagctttcctgaccaagacagaaactgggctttcaggccacattcatgaagcagaggccctcagcttctgtgcctgtggctacagcacacttcccagttacccctcagttctggccgatggggttcatctccgctgaagattatatcgcaaatctcagttgggagcttctctcaaaatgtgactgccacctgagttagctggcagacttctgcgatcttccctgtgagatagggtgaggaatggcttccctctgtccctgctggggcctgggagaacatgcaaagctgtccaaatgctgctccttctcatatgttccccaccacccactaaatcagttccaattctagatagagttaaggcctccccccgtggcctggattgctgggatcttccatggcagtgtttgtcatggtggcattctctcccccttcacactctggaggctcacagttttccacctggaccatggtataggctgctgcccagcacttctttcaaacggtctgtgattttattcagcttttctaagttcccgtgttgcttcttggagaaaagttcacagcgtgaatctctgtattttgtctgtccacatgggctgtcttaaaatttgtgatgtcatctccatatgggatgaagcatggaggcaggctaacaatgcctccaatttgctatgggggggagaaaactatttttaaaatttttaatgaacacataattgtacatatttatggggagcaatgttatatttcaacacatgtatacattgtgtagttatcaaaccagggtatttgactgttcatcacttccgatatttatcacttctttttggtgtaaacatacaaaaccctttcttctggctattgatatatacaatgccttattgagaaccatagtcaacctactgtgaaataggacaacagaatatattcttcctttgagtgttacttctttttaaaaaaatgtaagttgaatttaatctttattaaagtcttgacagtagagcacttattagggatgccaaccagagctggtaactctgtggtagggtttgagggaaggtgtgaagcccctctttctcaataatatctgaatcacaggtttcacgcgtgtctgtgtgaagagaccaccaaacaggttttgtgtgagcaacaaggctgtttatttcacctgggtgcaggcaggctgagtccaaaaagagagtcagtgaagggagataggggtggggccgttttataggatttgggtaggtaaaggaaaattacagtcaaagggggttgttctttggcagacaggggtgggggtcacaaggtgctcagtgggggagctttttgagccaggatgagccaggagaaggaatttcacaaggtaatgtcatcagttaaggcaggaacaggccattttcacttcttttgtggtggaatgtcatccgttaaggcaggaaccggccatctggatgtgtacgtgcaggtcacaggggatatgatggcttagcttgggctcagaggcctgacaacaggcacttgaaatttcccaataagaatctttttttttttttggtcacagtcatgttagtttctattcaaattcttccttctctatccttccttcctgccccatcatcctccccatcccttcatcccatatggagatgacatcacaaattttaatgtacataggaatcactggggtggtttattaggaatgcacgtatctgggcctcagctctaaggattccagttctgtatgggcttagggtgggactcggaatctgcatttttactagaccttatttcacgctaatgcaggcttacattcttagtggcttatacaaaagtattttccagatactttgcaaatcatgaaaagtccagaaccaggatataagaaatttagaagactattgatgaagacaatggaatataatattaatagttgccatcaactgacagcgtagaatatgcttgatgtttaacgcatgttaattttcatcattataccagtcctggaggataggtgctattgtcaccattttacaatgagaaaagagaggctgaaaaggaagagtaattgcccatcttctcacacagtaaatagtaagaatgaaatctgaatccaaatacaatcccaaagtccttcctttgaggaagagaggaagtttatctactgactctgataacaattagtgactaaggccatttcttgaatgagtaattcttagcccgttatagaacctacaagacaccccaagtctaaaaaatgttttgttgttgttgttgttgtttggtgtgtttacctgtgtgagacaaactaacaacataagccatgcttcctcatttctgtttggcagcatgatttcataagcccctatgtgttgatatgtagttttttggagggattctttgtagataaaataggatagagtgcaaagactttcatgtctcttgcctgagtcactatattccttaaaaataaatgagccacgcacggcggctcacgcctgtaatcccagcactttgggaggccaagtcgggtggatcacgaggtcaggagttcaagttcagcctggccaagatggtgaaaccccatctctactaaaaatagaaagattagcctggtgcagtgacgggtgcctgtaatcccagctacttgggaggctgaggcaggagaaacacttgaacccaggaggtggaggttgcagtgagccgagatcatgccactgacctctagagtctataaggagatgtactctatagtcctcagtaagactgtaggtttttctcaacttttattttagtttcagggttacatgcgcaggtttgttctatagaaaaattgcatgtcgtgggggtttgatgtacatattatttcatcaccgagataataagcatagtacccaacgggtagtttttcaatcctcagcttcctccccgcctacaccctctagtagtccctggtgtctgtggttcccttctttgtttccatgtgtattcagtgtttagctcccacttataaataagaacatgtgttatttagttttctgttcctgcactagttcacgcaggataatggcctccagctccatccatgttgctgcaaaggacatgatctcattctttttctcattttctttatttcactcatctatctaatgattaatgatgttgagcatttttctttaatttttaaaagcttgattttttctttgtcaatattcatttgatatgtgtgatgaaaatgagaccctaaaccccccaaataactgaatgaaacccctgtttgccaaggggactgctgagaaaccttaaaagctacatctcctaccaaaacaggataagaggtatgacacatctcattacaacccttctctcaataactaccattggactttcttccttaagggctaaacagaagcaaacccagttgacagccttgctacgccactgatttcaatcaactgactggtactgcagccagacctgccttcctccttgtggtttccacaagcagctgatcagtttaacaacacatcccttcctgacttttgactactgaccacagactggttctggtcagttgacagagcacaggtttcctctttgtcctctatttcatatttttacacatacagcccaattttaatgcatctacacattaagtctctgccccaaagtgaacatgggaaatatggaacatgcatgcttgtttaatgtccacctgtgagaatattcatagctccttctacaacctgttaaatatgtatacttagccaattcattcagcataaatttctgtctcatccttcttccttcaaagtacctgtttttggtctctaatggaggctacacttcccagcctgtaggatgaccatcctgcaggcttcaaccctttatgaggaataaatctctcttctccaaatttatggatcttgtgattcttcggttgacagattgttctccagagctttcagttaagaagttttgagctccttcttatttttatttgaccccaagtgaatgtgttctttcttgggttagtagaaaaggcaacttcctgttctactgggtatagatttgattaaattgatctgggtactggacacgttctgttcagccacctccaatcaacatataagcagccactgtgtcttgcttaggctactgctatagctcctaaactaaattgctataatccactctgtgcccctctcgatgcagccagcatggggttttcaaaatgtaaatgtgatcctgttactattgctctctccaactccctccctttctcctgtaggatttgttttaaattgcttttacgattaaaaaaatgaagttcactagtacggtctaccagtcccttggtacccccacccacattttatcctttctgctgcatggctttatgccaaccttaacaactgcttcagcaaactgtggcttccacttacatttcccattcccttcccagagcagggatttacgcttgcttttgtggaggcctgagatatgcttctttcccctcattgcttagctacacccacttcctctgacagatcccaattcatgcatcacttccttgattttgatgactcaattgaatgcatcttcactgctaccaggagcaccatgctctctcctttgtagccctttctcagtggtatgtccacatttgctcatgtgatgacttgattttatctgttttctttttgtttgtttgttttgtttcaagatggagtctcactctgtcgcccaggctggagtgcaatggtgagatctcagctcactgcaacctccgcctcccaggctcaaacaattctcctgcttcagcctctcgagtatctgggattacaggcacatgccaccatgcccagctaatttttgtgttttcagtagggacagaatttcaccgtgttggccaggctggtctcgagctcctgacctcaaatggtctttctgcctcggcctcccaaagttctgggattacaggtgtgagccatggcacccggcctatagctgtcttctgtatgtgaccataagctccttggggcaggtacagcatctgttttcagtcatcattctatcctgagcatccagaactggcatatattagatgattaatatttattgagtatgtgagtaaatgaaggaatgaaattggtatatatgaacttgaacattatggataataatggttaatcattatataaatgtacatatgtataaaatactacatttgggcaggttttagggagtcatcagcagtacatgaggccagttgcttctgaatgggcaaaggaatgtcgtgggtcactcctgtacttcttcactgtgaaaatgtttttctgattaatgtctatggagtgtggactttcatggctgtaaatcaggtatcctataagcccccagataggagtgctggctgaactgctgctcaggaaaggcaaaccactcatttattaccatgtgttaggttggcacaacagcaattgcagtttttgccattaaaagtaattgcaaagaccgcaaaagcttttaatggcaaaacctgcaattacttttgcagcaacctaatagtaagatggcaaattatatacaatatatactttaacatcctgatatgttggctacattttaaaggtaaatgctttcaatgcaccacctatttctatatttctatgtttgcatacgcctaaagcatataaatgtatataaataaatttttaccacaaatcgttaagtgaataatgtacaaaaggcataaaattcaaatttgtttttttcaatacaacgactaaattaatttatacccaggttagcaggggttccttgtgttttctaaatattctgttaatgcttgtgtttaagagtggtataatagatgaatataagaagattttgttctaggatttttgacttataaaactcccttcacttttatttgtgggaagcccagacaggtcactggggtactgactcaatacacagaaatcatctgaggcccattgcccatttcagtctttcatttgatccagcagtcaatgcaaagccacctcatcaagaagttatagaagcagtagcatatcttatgaaagttgcaactcatttatttctagggtctcttttaaagttaatgatttcccatgcagactcttctactgacaagcactcagtatttctcagctaatcgcattccttccccttcacacacattactatccattgcacaacactctttagagccagccactctctagaagactgtaattgcttacctctcttaggaaactatccaagccctaagccctaccaggagctattagaaatttccttggctattcacaaaatttgtttgttgatggcttaacctcaaaagaaaaagagattttccaagcaagttataacaaacctgaataggctcttgaaatatgtaagccacatccagaaatgaaatcagttcaagtagcaaaattaattgttcttgcccatatctgccagctagcaaaagataaaagatcaaatgtttgtactaaaagtagatatgattttgaactagtacatgacttcaaacaccatagcacttcctaactgccacagaaaatcctatgaaaacaaatgaaaaattttgtatatgcttcgctattacctaaggggatagacacaacagtaatggagtttaacaaaaatgtttcaggattttatccccaatagcagagataaattggcagtgatattgattcaacattagtgggtaatttaaagagtatttccaaggatgtttgcatgttttgctatcttagtcaatgtgggctgctacaataaaacatcaaagactaggtggcttctaaccaacagaaacttatttctcacagtcctagagtctgaaagtgtgaaatcaggctgccagcatagtcggattctggtgagggccttcctctgagcttcactgttgtcttcttgtatcctcatatggtgaaaagagggtgagtgagctctctggggtgctttatacaagagcactaatcccattcaagagggcttcaccctcatgacataatcacctccaaaaagccctacctcctagctaccatcaaaacaaaggttaggatttcaacatctgaattttgggaggacaacaaatgtgcagtccattgcacctacctaccaacaacacaattcttacaagatggtagaagtaagaaatgagaggaaccacatgggctatgagtaatgttctggtaattgtttattttcaggatggattgaggcttttcctgcagtctctgatataataggcacactttgtcctaaaggatggcaaaaagagtgacttctgagctggggcttctgttgcccttctggaaggccattccagtattgcacaaggccagttgcttctgaatgggcaaagaaatgtcatgggccacttctggactccttcactatgaaaagtgtttcctgattggtgtctgtgctgtatggaatttcacagctgtaagtcaggcattctataagcccccaaataggagctctggctgaacttctgctcaggaaaggcaaacccataacccacaggtgcctatcttggtaagaacaaatattgatcctccataatggaaagtgacttgttgatttcctttgaggaacaatgctatctcgaggctttttgttggtttcctttgcggatcagttggacgctcagatgcagcagtagctacatccgtgttggtcaatgaaaatccatgtcgtaggccccaaatgcagcctatatgtttgtcactatgaccactctggccatcatactgtactggagcggccgatgacaaaggccggctgatatctcctggctaagttgttctatgtgtttggttgctcagtgccttttccacggtgaatgttttagatgatgttaacactgaattcacatgttgtatgacaatgtcactctcatgtgtcagccatggacctctaccttagaatttcttgtctttgttcttccagttcttttccttccaagtccttggccagacatccaggccagtggccacttcagggaaatctatagatattctcatcttgggccacttctccttccatacaaagtgaatgactaagagcactactcacagctctgcccattggaaagaatttccccttttgctcttttgcgtggccaatcctatgtgcgtgtagtgcagccactatccatgttggcccatgcactgagccaacccctccatcagccactttttcctcatctttcagctgttggaatggtactcttcatagaaccatgactgcaagccagtcgtaagtgtccctcttaccacctgtttactcagatcacagctggtaccacttgtgatagttcaggccctccaacaagccccctcgaagattttactaggggaaatgcctatgataaaacatacggaagaagagcagggaggctgggagagtcatcataccccatgcaagtctgagcctgaaggaaggaaagagaaaaggaaggttggatggaagcatcacagaccagtgtgcagtctaatggaagtccagcaagagaccactggggagcccatgaggcagagttgccagaaggagttccctgtatcctagggtcaaaactgccttagcatcactgagtctatgggaagcatggtgttggctcaaacatggtgatggatttcaaagaacagccagggacctcagtcagttccactgcctctagttagagttctgcaaggtggattctcatggtcaccaaaatatccttatataggctcctcctgatgattgcctcatataattaacccagatttcagtcttataaaaatgagcctgggccaggtgcggtggctcccgcctgtaatcccaacactttgggaggccaaggcaggtggatcatgaggtcaggagattgagaccatcctggccaaccaaaatttctctaatgaaaatacaaaaattagctgggagtggtggcatgtgcctgtaatcccagctacttgggaggctgaggcaggagaattgtttgaacctgggaggtggaggttgcagtgagctgagatcgtgccaatgcactccagcctgggtgacagaacaagactctgtcaaaaaaaaaaaaaaaaaaagagcctggatgcagtatcgataaacacttctacccaagttattcaaccatttcattggcatgtgacttgtgcagtctcacatagccctgctcttacaagggctccgtacttgaggtttaatgctttgggttaaatgctttgggtttaatactgtgctgttgccatcttaaaattctgaataatttttttttttttttttagagacggagtctcgctctgtcacccaggctggagtgcagtagcacggtgtcggctcactgcaagctccacctcctgggttcacaccattctcctgcctcagcctcacgagtagctgggactacaggtgcctgccaccacgcccggctaattttttgtatttttagtagagacggggtttcaccgtgttagccaggatggtctccatctcctgacctcgtgatccacccgccttggcctcccaaagtgctgggattacaggtgtgagccaccatgcccggccctgaataatttttttaatgaatggccccactattttattttttcctgggccccacaaattctatagtcagacctgtcaatcctaccagcaaaacctaacccatcaagaatgaggacaaatattaggattatcactgctgaaataattcagtttgttctctttagagattttccagccagctttgcaactgctatttaagtccactctaaaatattcctcattttaagaaacaaattatcagctcatttctatcgagatgttcaatgcttatattcccagtgacttctatacccctttaaatcactgcttgtttataagaacacaacttctgcaacaaaacagtttaaattcattagccggggttgtcatggtcaattgcatagtgttttatttcctttagctacagggcagtttataatgaacacatctgactgtgcctaaataaatattgcatatgatagttcaagtaaaaaattcatgacggaggggaaaagccaaccagatctctggaaagaaccaagatgttcaatgttgagatatattttcattgcttcgctttggtaatttagactcttgtcttgaggtactctttcaagaactaataactacttttttttacctggtgattgcctgagttacatttggccaggggatgatttccagggtcttaagtgctattgcaccaccactgtcacatcagacgattcaacaatttcttctctaacaaaaggagcaaaaaggactaacccaaatccaattgcaattttctctagacaaactcttgattggcaaaattatggggatgctaatgacctggatattgtacattcatattcttcacagtgattgtctctacccttggccaaaagagagtgttgagagagacaaaagtactcttgatggctatcagctgagctggcctggctctaacaattaggccatggtgttctgctgaacataaagaatgtcacataacactgcatcagacaaggccactctgcctatgatagcacaagacaaaaacaaaccactccatatttatatctgactgagcacagccaaaatccagaacacagtgcaaactaagaaataaccagacatccctctccgttagctaatacgagtaactggtacttccttaccaattctagtgtggctctactttatttctcctgcctttatataaaaataattaatacacttcaaacatagaacagcccttactttgacagcacttaattcagagcacagccacgtgttctcaaatcttctacaaaatcatctaacataagctccagttctctaacctcccactaccaccctcaacacagagatgccccatggctcaccatgtgttcttcctcacagcaagaagcaattaaactcacctttgtttgactaccagtttgtttctagtagactctgactagaggacattgatagttcttatctcaattcttaattttaattatatctttcttttttttagttatttgttaacattgggttacttacagatgataacagcaagaattgtgttgatttcattcactttgcatttgcaaagcctggtatattgaaatctgttaacaaatacttgtagaatgaatggggattaaaggaaatctgagaataggaaaaacacaatatatttgacttgaaaatttttaaaaattatcttcttttctatgtaatacagtataaaccagttatgccaaagtttgacaagcctagaatcaacatccttactttataaagacttaccttaaaagcataaccactacaatggaatattatttgaccataaaaaggaatgaagtatgtactgatacctgatacaacagagatgaatcttgaaaacattacactaagtgaaaaaagctagtcacaagagaccatttgatatatgattctatttatgtgaaatgtccagaaaaggcaaatctgtacagaaagttgtttagtggctgcctagggctgggggatagaaggattggatgtgaaagctaaagggcatgaattttttgtggggtaatgaaaatattctagaattttttgtggtgatggttgtacaactttgtgaacatgctaaaacccataaatcatacaatttaaatgggtgaattatatgtatataattcatataattatttgtatgaatttatatgtataatttatatccttatgtacatataattatatgtataatttgtatccttatatacatgtaattcaataagactattaccccaaaataaccatcaatacagcattttgtatctactagagatgtacttttgatatttttagtgacatgaaagcacattattaatataaagttgtgcaaaatatgaagacacagaaatgactacacaatgtgatgtgaagtatatttatagacagacagagaggtctaaaataaaatgccttaaaatgttaatgctattttagctgcatttcaagtgatttttatttttaattacacagttttcctattttccaagtattccatgatgagaagatattacttatagtcagaaatacgttacaaaaatattctaagtattataattttttgtgacatagttttattgttaaatagaaaaaaacttttgggttctttcaaagcaatcatactttacagaggacacaggaaatatatattatacatatacacattaatgattatgaaaagggtatcttttttgacacataatgatcaccttcacaagagaatagtatgtcagagattgacaccttctttttttttattattatactttaagttctagggtacatgtgcacaacttgcaggtttgttacatttgtatacatgtgccatgttggtgtgctgcccctgttaactcgtcatttacactaggttatctcctaatgctatccctccccccatccctcaccccatgacaggtcccagtgtgtgatattccccatcctgtgtccaagtgttctcattgtccaattgccacctataagtgagaacatgtggtgtttggttttctgtccttgcgataatttgctcagaatgatggtttccagcttcaaccatgtccctacaaaggacatgaactcatcctttttttatggttgcatagtattccatggtgtatatgtgccacattttattaatccagtccctcactgatggacatttgggttggttccaagtctttgctattgtgaatagtgccgtaataaacatatatgtgcatgtgtctttaaagcagcatgatttataatcctttgggtgtatacccagtaatgggatggctgggtcaaatgttatttctagttctagataagactgacactttctgatggcatttggttatagcactggagtaaaattaccagcagaatcaaagacaaaatcttaatttttcataactcaacactgatatatctttaaagaagacaggataaaatgcttgccactgcatttatgacttcccagaattaaaaaaaaaaaaaactttaggttaaaaaatctgaaaatcttctttaaaacataatttaagaatatctcaagtgctatgtaaaaactctaaatgcaaaatacttataacttttgcaaagaaaatgttgaaaactacaaaagaacttgtagagaaggaaagaaagattaatttttagaggatgaagctggaaaaatgttgtttcctatgagaaagaatacgagggaagagcaacaattttggtaaataattgaaaaactctgcattataagattcagtaggctgctaatgcggtccttaacatgtgtacataaaaaataagcaacacagttcctgtcctcaagaggcttcatgctacctggggacactaaacaaagacaggttcaaaaatacttaaggatgtttctggaacaatgtgtgactaacagcaaattcacattacaaatatgaacaagcactgagaatatgcagcaaaagatagaaccagccctgcaattcacgtcgtgcaaaccaggtaggtagaataggaggacatcctggggcacaggcgtaaaggctctttaggacccagaagtacattttattctcctctgagaatggtcttaatggacccagctaccccccaattcattgatcctcctgttaattttttttttttttcaagatgggatctggagtggcacccatcacagctcactacaacctggaactcccagattcaagtgatcctcccacctcagcctccagagtagctgggactacaagcatgtgccaccacacccagctaattttttattttttatagagatagggtcttgttgtgtttcccaggctggtcttgaactcctggactcaagggaccctcccaccttggcctcccaaagtgctgggattacagacatgagctactgcacccggccagaagcattcttaaatactcctccctatctagtcacctctgcttccatttctctgcttgccattacttggtttttactccagtgttacttctttccagaatctcagtttggtatgcactagatgtttgtgtcctccagaatttatcttaggagccctaatccctgttgttacggtatttggagatggggctttgggaaggtcagaagagtttgatgaggtcaggagaacagagccctcatgatgggattagtgccctcgtaaaaaaagataccagagagttccccacaactcctgtcaggacccagcaagaatgtggccatctgcaagcaaaacccttattagaaaccacccttctggaccttgatttcagacttccagcttcctgaaccaatgagaaataaatttctgttgttcaagccacccagtctattggtattgtgttatggcagcctgcgctaatacagcacactttcttctgactccttaaagactttactttttaagacattttaagtattggagctctggtaaaaaaaataaataaataaataaaaaagaggtaaaaagtgtaattagtgtatctgtacattttgtaaaattccgcagtcgaaagcaaggatggactttgtctctccttttttattttaccttatatatcttaatttcttgacacgagttgtagattaatttgatgtttgattctcttaaaacagagataaggaaaagaattttcctgtttgctgtgtccattataaaaaaggaacagccggaagaaacaatgattttgctatcttttcatttccaaacatttttgaaaatttgtcttggaaagaccttttatatgcatactgaacggtactcatttaagtagccgatatcaaatcactctttctagcaaatttatttggtcagtttcataaaaatttctttcatagtaaatccacctggaaggcacacgaggaggatgatgttcttagaactcggctcttgtttgttgcatgacaggtgtttccactgtcctggtgtgcatctggcaacagctgcaacgaacctttttcagaataaagccgtgtttatcactgtccatggtgaggaactttgagtcttcatacaagtgttaagtacaggagctggaagagacatgacttactttctcagaggctggttgtgcccccaggcactcctgcagttcacctgttttggcatttcagacagtgcacgcttggtctccaaaggtaaggaatttgtgctgctatctctaattagcagtagaatatacttattttttccagccttggataaaatcatcctgctgcttagtctggcataaagcttctgtcaaagttctggttaaaaagaaaagacatttccagagggtagtttaggagacacgctctatggccactcttctatgtaatttaaatgtaatctttggattaaaatatcatatgatggctgcaaaagtcaatcgcagcacctcagcatgcaataaatttaccttcactggactgtattctaatgtgcagcttggggtttttatcaaagccaagcaaattgaggaactggatttgttattaacaccacttttatgaacatcttgcattgcatcactctatagttccaacctcatgtcccagaagaaaatgtatctaaacatttggaacaccagagcctttgtatggtttgaggaactgatgtatttcttctctcaggtaaagcgagaatgaggtgtcacattttccccttcactttggattctaggatgtatagttatggcctgtatcgatgctaacttaaggtgtagtatatttgcttttctcctttttattttgttttcctccttttctatgttgttgtttttattgtgcttcttttttccagtaattccctttaaatccttgtgttttaccgtggaaaagaacaaacttatgatatatatacatatattttttttcgagacagagcctcactcttgtcacccaggctggagtgtgttggctcgagtttggctcactgcaacttccgcctccccagttcaagcaattctcctgtctcaacctcccaagtagctgggattacaggcacccgccaccatgcccagctaattttttgtatttttagtagaaacggggttttgccatgttggccaggctagtcttgaacttgcgacctcaagtgatcaacccgccttggcctcccaaaatgttgggattacaggcgtgagccactgctcccagccaatttgttttcttttaaatgaacattaaaaatgagaactgtataaacctaaaaaatttttctgtcttctaaaagttcaactccataggtccctctcatcaaagagagaaatcagcagccatctaacctgggcaatagagagcaggccactccaatccccctcacagacatttccagatgctaagaagtcttgtttgtaagagatataaaaacatgatgatggtctctttcctcctttcaataatacgtgaaatttcgtgaaatctaaaggcagttacaacggtcaaaaggcttgtgatgttatgctcaactctacacaaaactttgacatacaccttgctattatttctgtggacttatgagtagggcatagaaaatttcagtttggtaatttaactgaactttgtctctaagatagattaaacatagctagctttagatgttcttctccatatttttaatatttcagtatattttgtatacttcatttctgacaaaaaaaattagcttcatacaaaacaaaaaaggattaggctaggatgaatttataaatatagtcggtttttttcccccttttaaccacttcacaatgatttgcttcatttgttagggttggtctaatacaggcattcttttataatttgtcatctatatcaattcatttgacattttcctgaagtatccaaaatgtgaaaggaagaatacatgaataattggtcagaactgtctttgtaggattcagggcatttcaatgtggagcttccctgcgttgacattgccattaggattaacacttgtagaaaacccaatataaagcaaaagacctgagatgatggagaagacctcaggtggatgcaaccaaaaattgaggccggtgctgttctcagcttgacatctgtattctgccttctctttataccatctttgaaggcttattcgctgtgacaattcctgactcacagatgtgttttgagcccttctcaacagagtagctagttgccaggtggtgcgattttttaaaatagaaagctagagagagagtttattttcagaaccaatcaatcaagccctactatacatgacaataaaataggcataagagaaaattgtcctgataattgtcacaggctttgatgctagatgcttagatctcttataaattgtagtcagtggggttttgggtcatatttaattttatttagaagaattaatgtaccattttagccccgaattattaaatttaaatatgtgccactaaatctggagccacatctgaacttaattcatttcatgttttttggtgacaatttgggtgcattcccaatgatactgcaaacatatgaaaggagcgaatgaactgaaatatggtggaggaactgagagttctccttgctcttgagcttgcacaaagcccgaagggcttgcacaaggttcttgcttagaaataaagcttctttaatccaattactgggtatatacccaaaggaacataaatcattctaccataaagacacactcacgtgtagttcattttaacgctattcacgacagcagggacatggaatcaacctaaatgcccatcaacggcagattggggaaagaaaatgtggtacatatacaccatggaatgctatgcagccataaaaaaaataaaatcatgtattttgcgggaacatggatggagctggaggccgttatttgtagcaaagtgacacaagaacggaaaatcaaatgccacatgttctcacttataagtgggagctaattaatgagaacacataggcacagagaaggaaataacagacactggagtctacttgagggtagaaggtgggaggagggagggaatcagaaaaaaattactattgggtaataggcttaatacttgggtgatgaaataatctgtacaataaaccccatgacacaagtttaccgagataacgaacctgcacatgtacccctgtacctaaaataaaaaattttaaaaaaagacagtcttgtgaccttcctgagagaaaaattataccacactgtctagaaagcttatcttctactaagcaatcaatttcaggaacatgcagaatattaagaggaagtggacaaacccttagccactcagaagtggaaactatgagaagccattaaacaatacaaagactgttaatactatttctgttttgtctaaataattctgcttctaggaatctatataaaattatatgcaaaatgtgttatagtagaattcttttttttatttttatttattttagcgacgaaggctcactatgttgcccaggctggtctcaaatttctgggctcaagcaatcctcccccctttgcctcccaaagtgctgggattataggcgtgaaccacggtccccagcctagaattcttagtatttgacaaaaactgggaataacttcgatgtccagtgatatggaataagtacatgtatcatttgggaaattcccttccctacttttctatgtaggattatttatttcctggaccccacgttgctctcttttttggttttacttgtttgttttgctggatcagatcttctgggggctcatcgagaaagattacagagaaaggatgcaaacacagtaatgttttagaatatttttgtctaaaaatggctttaattcatacttatacttaatggtttgatcggatatcaaatttagtttgaaatattttttctctgagttgtgaagatatcatgctcttcacttcttgatttcagcgttgctgttgaaagttctatgtcataatttttcatcctttttatatgaccttattccagggttctgatatttcacaatatgccttagtgagattactcttttctatattgtactttgctttttgatggactctttaagtctgaagtttcatgtttttttagttccaaagcttttacttatattgttttctagtgtattttttttctgtcttctccctatcttgaactggacatttgactccctggactggtcatctaattattgttaacttttctttacaattttgcatctttttttatttatgttttatcttaaggaaaatttatctgattttattattcattcctttcattgactttttttattcttgccatcatattttttgaatttccaggaatcttttcttaagtattgcttttttgttcattattccatatattaaaattatgctgcttcaattttccttatccataaatttctattttatattatcatttgtcttttacagctgctttttgtgcaaacttcttaatatatgtaggatagtaaaaagaacatacttttgtcattgttgattttttctgttgtatagttggtgactatgcttctgcttctttcttttatctttctttcagcttacattcctttttttccaaaatttaacagttacccactctattacttatatctaaataaattgcaaattgaacaaatacttaaatatttaaacaaaaataaaaattctgaaaattcatgaggcaattcgtttataacctcagagtgaacaaggctttttaaactgttttaaaatccaaggcagcaaataaattaactttaactaccttaatataaaaatcttcaatgcaaaaaatcattaattatgattgactcagcatttctgcttctggaaatctatcctatagatatctatactctacatataacattatgaaattgtttataacgtgaaatactggaagtgtgcattagtaatgaaatttttattactgttgaataatatgtagctaaagaaaaacatggcaatgcttcctgataacatcaaatccaaggtatattgttaagtgaataaaccaaaatgcagaatagcgaatataacaagccattttttgtgcaaaagggaaaaattaaaaataaatatattgtattttcttgtaatttcataaagaaacattgaaaaaaataagaaaataagaaaagtagtttctaaaggtggaaaaaaagggaagagcttagaagtagaccggataggtgagagacttctcaatgcatgtttttgtatattattttgatttttgtaccacatgagtttatattctattcatttattaatatcaaatatatacaaaataaaaatagtcaataaaattcgaaaaaatatgtgtgaaacctttatggagaaagttatacaacttttaaaagaaataaatgagatatattatattcatgaactgtaaaagtcggttctcctcaaaatgatttatggagtcaattcatgcttattccaaattttaagatttttagtggaacttgtccagctgatttaaaaattttaatgtaagttccaagatctaccaataggtaagataatcctgaagaataacaaattggaaagacgtgtgttctgccaaatatgtagacttattttaaagctatagtaataaatacagtacagtcagaacaaggataggcacatagatcaacagaacaaataatgaactcagaaacactctatgcatagatctagacgtagcaatgttgcttgtgtggtagggatgttaatatgcaccgcgtatccatgtgctgccacacaacagatcccttcacttaggctggaaccacgtgactaattctgaccaatgggccatgaagaaaagtgatgtatgtcacctccaggcccagccagttaaaacctattggagggacaaatagagagtcactaagctatggcaatattcagtttcttggtctgagtagaagatataaagattttgtattattagtttagtttaaaatttaactattattttctatatgtttttttcccatttgttgtgaattatacaaattagaataagtgaagaatggtttcccacaaatattctaggcacgcaaagaattttttgtctattactgctgtttgcatggcatattgtcaaatttcactacttggtacgtaaaagattttttacaataatggttttattatggattcaaccttttaacaatataaaaatgactcaccttactccctttaatgatttcttacttaaaatgttatttctgttattaattttagcattgcattcctttgttagtggtttccttgtagagattttgcttcttactttatttctgaattatgtgtgtataatttttaatgcatatgattttaagaaacatttaattagatttaaaaaatctcattctcaagttttactcctttaagtggcaacatgttctgcaacccaaatgtgctattacaactatatggtagattttacttctgccattttgctttatacttcctgggttttaatgtttgtgatttttctgcttttactatgtaaatgcttttgctcattgttatctttagctgtttagaaggtagacaccatgctttgaattgaagaagttgtttattatcatttttcaaagctgtgtgtgtctatatgtatgcatatatgtatgtgtgtgtaaagatgaaattatgaaatggctatttctgtagaggctgagagttatgcaaagattaggactcagcaaagagacaagtggtctggcaaacaaacatgggcttgcaacatgctgcaggggacttcacctctgagggtctggaaaaaagaaaacgggctattagaaagtatgatttgcttcaaaatgcagctgctggctgcttaactcattccacaggcacagctgtggcatgcacttgtagattagaaaggctctacaattttttagatattattagaaagaataatatttggcatttctgagttgcaattgcaagttacatgattttaattgtgctatggtgttacagcaatatactagctttatattgtcgggccctggcctggggtggggcagtggtatgttcattgcctgccacaaatacaaattctggatttgtgttaaggtccaaggtggacactggaagggctggccttggagttacatggcttgcccacgagctctagcgatacatcatatggacttgaggttgaacaaatgtatgcacaagaggaaaaaatcttccttggaaatcaagtttcttagacctaagcaatttcttataaagagatggtaaaatcagacacaaggcccagaactgaaaacatatgctgaagggaaagtgtggaactggtaacacaggtggtcaccatagcaaatttctcatcttggaccaaaagaagcaatgaatcaaatatgacttagagaagtattgcatgcacaaggagcttttctccccccagacatggccaatatacaaaaaaatcaaaccaaatttgtaaatgttctatgaattaatctcaagctggaaaaattattttcttcttgaatgtaaattctcagcttctggattcttgaccactggcattgaccaactggcatctcgttgagcctgaagccaatatctttttctcttttccactgacattctgtgcatttgttattgttggcaacgttaagtactcgataataggaagataattttggctaggatagtaactgaggaactagggatagcttcttttctaaatgttgcttgtgtggggttaatgctgggataatcttgtgtctcttattaaatctttaaatccttaataaatgaggctcatgggatatgtctggcattgaactaacccagactgtgaagctcttaaaaagtttgcacacattccactgagaaaggtatttcaccacctcacaggatacaaaaaacaacaacaacaacaacaaaactgctgtgcctgaaactgagaaagataagaaatttgagaagctaattattgatttttaaattgaaattttgaacactgaaatttaacttgtgtgactaagatttttcgattttggattttagcttctttagatcttaacatctttgtgctttaatttgcaagggaatttaaactttgaattttctattttggagcttgatgatgggagaacttttgtccagcatctctatagcgctttttaattatttttgttattttattctttattatttttgttattatagtaactttatgcatgctagtattgaatactgcaatgtcattcaatctcatttcagacagttgcttctgggtacaaaaattccatagacataagttcattgactgggtcctttttgctgtaaaaagaatgttgaccagaagcattgtgaggtgagctcagctatgtgataatgaatgaggcattcactaagttcacagatggtcttgatgaaagtagcacagagggtggggaggaaaatccacatccagaatgagtctgttaatatgggaacaaactgaagcctcctccatgatggaagagatccaatgtcatcaagcttccactagttaactggttgctgccttttccttatggtgccagttttaaaaattaactttggtctctcttactggtcacttggacaatgagaactggtggtagtcatatctgctttttaaagaggaaatacgtatcgttgtgtccatgtgtaacctctggctcggcatcattgacactttgttcataacttattaaacaagcactggccagcttgggaaagggattaatttatatccactgaacaggtcatcttgtgcaacactgcactgagttcttttgtagtcagtgtgctgtggggagcatttacatgagacaccattactctcccttgggcagattcttaaaagtccatacccccttacatctcagacatttttgcaacaaatataatcttgattttcttccaagtttctaactattcggtcaaaccattacttactgtccctgaatcagtatagatgtataatttcgaccatcttttcttcaatgtatacaactataggaacccttgggaatcctattctgtctgccctctctcctcaatgatagctatgattccacagaagtccctatctttctcagtgttggactatttatgaactagattccattttttttcttcctgaaatgttaactggtcatggagaacagttaactggtcacggagaatgcaccatgcagctgtaagttaggaattagggagagatgttctagtagtggatgtgggagttgtagaagtatgaacaatctgctcataaaaattacttgtgcgtttggagctggttttgtcctgatcttgtttataactttgctccttcatgatggaatgctgctatatcacactcaattttgtgacttagaggaccagataagagccaggtcatgatggggagaacaggtcacatggtcatgtaaatcctacggtgaggcattcaggctcttcaaggactcagtagtaagccaggagctgtgtgtgagtatttgcagaaaagagcatggattcttcaaaatccctagggttttacactgtgactctcatcccggcttgccccaagctccacacagaatcttaagctgccatagacaccttgaacactgttttatctgctaggttatgaagcccaaatggcagaacagtttgcactttagcctgaaccagctagaagtcttttcttggtatggcccacagtgaaagctgccattcttacaggatgcttggtaaatgggtcaaaagggcttacccaaaattatttgcctgcaaaatacaaaaaagaacattattcctctttcttagtggaaaggagtacaagatagaataaatttgatttcccattgtattgggatatttttctattccccagaccctcggactttttaacactttcctaaagtagcacacatctaattttttttatgtgtgagattattctccatgtatatttgtcttaccagagccatgaaactcgttacttcttgatcatcaggcacttttggcccattttcatccaatagagtgaaacagcttattggcctatgtcctgtggatatgagacaataagattcttgtgaaataaatagtaagagtcaaaaactgatgtaaccttgtccagaatagggaagatgcattgccattgtggacaaatgaaaagaaatcactctgatgacttagatgttatatctgacagatacagagaaacaataattgcataggaagagttatatactgttgatttattacagtaaaaggacaaaatctggatattgcagctgaagtcactatttaatttcatttaaagtaaatctgctttcatctttcaagtcacaactctcaactgtgtatgccttccaagcaagttaagtgagagtgtagaggaattagtatagcttcatctctcaagacttttaagaatgtagtattgcttctacgttatttatcttgtggagtggaatagaattctgtgagccctcccaccataatgactgccactccatgtttcagggagccactggagactaggaattttattttcctctgtgcattcaggagctaagtacttcttcctatggaatgaaatgagcaaattcagtgaactcctggccccactgtaagatggacttggtcagaatgctcataaactgcaactctactggactatggcagggtgaggatttatggagattggccttagttcagaaccacatactaggaatcaccaaagttatgggtatttatctttactgctgtatattcaccctgatacatagttctaggtatctttgggaaagaccagaagaaagatcaatagtgcatacttgtggctgtgtcacagggtccttgagggtatcaagcttctctttattcatgaagtatggagactgtaatccataactagtctccggatgagttctgaagtataaatctggaaattaggtatggggttaggcctctctgtcattatgattcaaatattaccttcattaagtagatttagaggttttatagtcgcagttactgagctaaattgagacctaaggctacttattatctaattcagttttaagaatttataattcgtgtaatcattgccacaaattctgaaggttaaaatgtggtgatcactttggtctcggtgtcaaacacagaaactacatctaccttctctgatggttatgtgttgtcacatggcatctctcacttctagccccgtcttcattggaaacatggagtctaattcaatgacaatatcccctaaagcagatgctgctagtgctccaggcacatgcttgctgattcctaaccttgaaggacaaaggtgtacaatgttaagataaagtgagatggttacccggtgatggctttcaaagagttgaaaatcccatagtccatttttatttgttacttggtacatgaattaaccagcatggttaaaagcatagacagtatgagataaatctactcctgtcacctgaatttgtgcataatgtaaggaaaaaaggcagactcacaggcaaattctatttcaaaatcaacagagccaacccgtgggttgaatgaatggataagcaagctcctagattgcatatttgtctaagattatgaaagacagtaaattatatgcccagagctttagaatcattaacaactaaagaagattcacaatacttatcagtgggataatctgattttatcagttggaaagtttggcttagagtacaatgacataaggcttcaaaatatctcaaggaattctgttgagctgtggctcatagaagagtatttcccaagagtggtggtgtgcttttgtaaaatagtgttacaagtttctacagcaccactcggtctaaccccacccttttgacatggagagactatctagtattgtattattgtacttgcctgggattgattttcagaattaatttatttgttggggtgcaggatgaggtagaaacgaagtgcttatcccaggagtcaaagtcaaagagaatgaatacgcagggctcctctggtccagccctctgatgatagacacaaggatgagaaggcatttcacaatcaccgggttgaattctgtgccatcttgggtgtcttttcctcatcgttgtctcatgatatagatgagaaaagtcagaaaacacacaatcaaacactggtgtatgtgttttattaatgttacattgagaactgtaacactatgattatactttaggatcagcaaaattgacaaaagaaatgcactggttatactaatagttatgacataccataggttatttgagaccaatgggcatacaattttgataagcagaatatcaagattatttctagaatggagatgggagattctttaaagacaattagtttctaattaataaattatatgctgtattattttctgtgctgtataaaaattgaccacaaatttagctgctttaaacaacacccacttatctcatcatttctgtggacagggagtccaggcatggtttagccacgtccttctcgttgctgcaatcaaggtgttggccaggggttaggttctggtccaaaggcccagctagggaaggacccacccaaaactcacttggtgattggcagacttaatttccttgtggctgtaggactcagcagcttgcttcttcaaagtgacataggaaagtgtagtggttgattttacgtgtcaatttggagggtgttttgggatgagattgacatttaaattggtggactttgagtaaagtacattgccttccttaatgtgggtgtgcctcatcccatcagatgagaacaaaaaccccaccttcccaagtaagaaaggattctccagcagatggctttcagacctcaaccacaccaccagctctcctgtgtctccagtctcctagtccacactgtagattttgactcaccaacctccataaccacatgagccaatttcttacaataaatttatttctgtatgtatacaaatcctactggttctgtttctctggaagaccctgactaaacagagggactctagagccagacagcgaccaagacggagtcatcttacatacagaagtgtataagagagtgacgtcagatctccttggccatattctattaactagatgcaggtcccagacctcacccacattctttggttaaagattatacaagggtgtgaacatcagggcaccaggaatcttgagactcaccttcaagtctgtctgctacatcctctagcccgttaagtgagaaactgtagagtgatggacaaggccttggccttcaacacaaccatgaagttatattctgggccttcagcttatatctatataaccataggcatttttcagtatggcaaggggatctccaaaggagaggagccaaatctggagcccctatgggggtgatctggtgattatctgtgtgaatgcaggaatttatagatgaagataagggtgatatagcaggaagatggagtgaatcattcccctgggaagctgtagagatcggagcgacaaggcaggaagagggactcaccctttctaccgaaaatgaaagtgccattggtaccctgaggcctcagaatacagagatggatgctaagaagccaaaggagtttgagttgcaggaaagggaagagggtaaattataacacgttctcagcttttaaggatcatggaaatttgttcccttgcttcttacccagcctagggtaaaaaaggaatctatacttgcactgtagttccagagcagactcaggccagaacgtgaagttgcccatctcaggacacctcagctgggaggtggaggttgtaatcacccaaggtgttcttcttgtcctctgcacagacaaggctggccaaggcaggagaactggagttatcactcaaatcagtctccctgaagaaggctggaaatttaatgtttttatggacaatttggtgggcagggggctaggaaatggatgctgctgactggttggggatgtggaaaatgatccttgtgcacaaagtgggcctctgggtggggccatatgacaggtgagtcatgagttatgggtcagagtgaagtcagcctgaaaaacatcccaaaggaaagaacaactggctggtcacggtggctcatgcctgtaatcccagcactttgggaggctgaggcgggtggatcacgaggtcaagagatcaaggccatccttgccaacatggtgaaaccctgtctctactgaaaatacaaaaattagctgggcatagtggcatgagcctgttgtcccagctacttaggaggctgaggtgagaggatggcttgagcctgggaagtggagctttcagtgagccgagatcatgccactgcactccagcctggcaatagagtgagactccatctcaaaaaaaaaaaaaaaaaaaatcttaggtttgacaatagtgatattttctatagaagtaattggggaagtcacagatcttgtgacctctggctacgtgactcctgagtagtaagagattatagaaaccagaccttcattttaacagatttcagccccctcccataatcctaaccttgttgcctttcattagttttataacggcagtgtagcctgttttacctggatcatccttgctttaaggtgtgaaaggggagtaaatctttggaccctcgaatcactaagctaaagggaaaggtcaagctgggaactgccaagggcaaaccggctccccattctatccagagtcatccctctgctcactgagataaatgcatatctgattgccatctttggaaaggctaatcagaaagtcaaaagaaagcaaccatttgtctctcatctacctatgacctggaagccccctcctcgcttccagttgtcctgactttctggactgaatcaatgttcatcttacatatattgattgatgcctcatgcctccctaaaatgtataaaaccaagctatgcccagaccaccttgggcacatgtcgtcaggacatcctgaggctatgtcacgggcatgtgtccttaacttcggcaaaataaacttcctaaattgactgagaactgtctctgatatttggggttcacaaaggttaaactataaattcctcccacagttagtttggcccatgcccaggaatgaccaaaagcagcttggaggtcagaagccagaaggagtcaactatgtcagatttctcttactgtcataattttgcaaaggcagtttcaaggtcaagatagcaggaacagaaagtgttgacaacgatgtaagcagtaccaaatgtagcagcaatgagggcagtggtggccacattcccatggcctggaagagagaggcttagaaggagagccagtcattcacctgacactttccagtaggagctccctaacaaacttggttttgttgccaacagtggaactgtctgcaagctctgtattatacttttccaggctgatggacaatttgaaatcttaactcacagtattgttgtgagaaaacaagatatgatgtaaaaatttccagcatatatttagagctcattaaataccatttttagttcaaattgatgaaaagaaacttccagactggtatctacttgataaacccaaaatatttttgaagttgagatcattgaactgacgaaaatcttttcacttaaaataagattcagacaaattcagacagccaaagcaatctgcacagttttttttttttaaactctaagttctctgcttccttcatgatttgcatgtgactggaaattgattgagagatatgacaaagcacatataagtgaaaattttggggggtcttttttctattgagtgggtaagagagagatgtgttggtgggttggtccattagaattaaatttggatcttgggaggccaaacagatttgctgtagacattgatctagagctacccattagcaagtataattcaaagactgaattgaatcttattaaaagagataaggcagaatagtcaaggcatactaacaaaaatgaggtatgggttgtgaccaatggccaaaaagagttgagagctaaatggaacataatccaatggaaaaacagtaaaaccatccaggtaaaacaggcttcgtgggtgtacaccctttgtggggcaaggctctgtgttgtacagggcctctctcacacacacacacacacacacacacacacacacacacggcctcatacttggtttaattttctgctgtcatcttggaatttttaatatttttaaaataagggacttcttgttttcattttgcaccgggtcccacaaattttgtagccagtcctgctttaggggccctgctttagggtattttgtaaaggtgagggattagaaaaggagtcttctagcaggatggcttcaggggctctagggtaaaggacagagccctgtggggcactggttacaggtaaatgggccagttaaccttgagtaacctgctactaagtcttcagggtccatgtttaccaactggaaaattttcggtctaataattatacctgtactttttttttttttaactgctggtaccattaagttgaatagttccttgaaaagtttttaccatcattctttttccagcctcccagaaatcatttgtgattctgcttattattagtcttcttatcacgttgccagattaattaagttaaagggaagagcggtgggcattttaaaggggaaatctgtttaaatacacacaaacacaaacacacacacagtttgtgttaatatcctagaaacagattctattgcttttggtgtgatatacagagtgaagtctcattaatacgtgacgcatcactctgtgtgtagatgtgtccaatgtcttgtaaaactaaaacttgctttttgtgtgcgtgtgtgtgtgtgtgtgtgtgtgtgtgagacagagtctcaccctgtcacccaggctagagtgctgtggcttgatctcggctcactgcaacctctgtctcccaggttcaagcgattctcctgcctcagcctcccgtgtagctgggattacaggcctgcgccaccatgcctggctaattttttgtatcgttagtagagacagggtttcaccatgttggccaggctggtctcaaactcctgacctcatgatccacccacttcagcctcccaaagtgctggaattacaggcatgagccaccacacccggcctaaaacttgcttcttaggtacattttttaaacatggtttccagaggtgttgacattagctgccaaagagtgaaaaacaatatccagtatcaagaataaaaacaaatgaaatacacaggcgtacctatttattcctttactatatagacagcttcagatggcacttcagtcgtacaggttgagtatcccttttccagaatgcataggacaagaagtgttttagattttggattttttcagatttttgaatatttgtgtatacataatgaggtatcttagggacgggactcaagtctaaacacaaaattcatttatgtttcatagacactctcaacacatagcctgaaggcaattttataccatattttaaataattgtatgtgtgaaacaaagttcgtgtaattgaaccatcagaaagcaaatgtgtcactatcttatatcggtgcctaacaggtttgaattttggaacatttcaaatttttggattaaggatactgtacacagtttattttgaaatttgtaaatagtggtggccgggtgtggtgcctcatgcctgtaatcccagcactttgggaggccgaggcgggtggatcacttgaggtcaggatttcaaaaccaggctggctaacatggtgaaacccagtctctactaaaaaatctcagctactcaggaggctgaggcaggagaattgcttgaaccaaggaggcggaggttgcagtgagccgagattgcaccactgcactccagcctgggtggcagagcgagactccgtctcagggaaaaaaaaaaagttttaaataatgtttacattaccgttttgtcaaaggtctttttctggtcgctatctctctctctttctctgacacacacacacacacacacacacacacacacacacatacccacacacatacacacacacattctcgtagcctcacatgcatacatttatagttcaccttctcttctctctaccatgttctctttaccaggctaagccagcaatggaaaaataataggaacgagtggcccttcagcaagaacccatgaagaccagcctatgttttccattttgggccaggaagtagcaggagacttacatcctgtgctgttaatatcagatcctctcggtggtgcttgctcgccatcctggagccgtggaagtgggtagtttgcaatgcaccacgccattgtatacaccctttccttctaatcatcccagccagtgaggtgacctgaatcggcctcctgggaccaagcaagggtggattatctatgtggtcagatttcgtgccttcataactacaaacttactgggactccttacctcacctaattatttaaaaaaaaagtcaacaaataaatattttgcctattatgctatttagtagaagagagacaaaagattcactcggattagattttttttaagcctatcaaaaccaccaacacaaaacaaaagcaacatgccccaaccagattcacaatgaaacacacagtagttattttagtcagtaagattcaaaagtggtgcctgaattctttagagaatctatggatgatctccatggctccccacccttaggggaatgagctctctgtagacagtaaggaggttgggagcaaccctcatagtgcaggtgtttctgactcatcatagcaacagacaacctacaaagctaaagttgtctaagataagattgttaatatatttcttgccctaaagagtctgttgaggtgaaatcagtgctcagtcatcacaaagagcatagatatatctctccaaatgaccgtgaagtaacatttcatgaggtagccaatattatctcgtcaaaaccagcagcgtcttcattcttccctctccgtttatgtactcttttacccactctcttctcatctccaaccggtttgattttaaactcagagactgaatgatcagctgactagacccataacaggaagtccatcattgcaataatgtaataacaaattatcaagaatcacaaaagacatcagagtaataaaatggaaagggcattcattttggcactcaggataattttggaaacattctggtgaattacaaactttattttattcttagaacgcaaccagattgaagattttagtaatgtagcaagcagccatatgtcttcatggctatccaaattttgaataaatcttcctggcacctattatgatatttagatatccgaagttgttgatatttagattttagatgtttccaatatttggtcatattaaacattaaacagtttaaaattttctccttatcatatcagaactaccattctaaaaacctgaccgtgaatagatggtagataagaaggataaaacacacacacacacacacacacacacacacacacacacacactcatgcacacatgtatatatatttttaattttttgagacagagtctctctctgtcacccaggctggagtgcagtggcgcgatctccactcattgcaacctccagctcccagattcaagagattctcctgccttggccttccgagtagctgggactataggcgcgtgccaccatatccgtctaattttttgtatttttagtagaaatggggtttcaccatgttagccaggatggactcgatctcctgacctcttgatctgcctgcctcggcctcccaaagtgctgagattacagacgagagccaccacacctggctattttaaattttttcttgatacgtaatagttgtacatattctggaagtagatgtgatattttgatacatgtatacaatgtgtaatgatcaaatcagggtatttgggatattcacctcaaacatttatcttttctttgtgttgggaacattgcagttcttctcttgcaattattttgaaatatacaataaattattgttaactataatttccctactgcactattgaatactagaacatattccttctaactacagttttggttaaagggtacaaaaacacacacgtatattatagtatgtgtatgatatatagcaatatattatatatataaaatgtattttttgtgacccatgatctgacacgtgatctctgtctgtagaacagaatactagaaattggaaccaacctagaaaactatagatatacattttatatatatgtgcaatgtattttatatataaataaattatataaatatataatttatatatgcattatatatgcaatatataattattatataatgtatatatagtacatatatgtatatattatgcaaactatagatattacattatgtatattatatatgttgcattttacatataaaatatatgtttttcatatatatatataatgcaacatctatagttttctaggttggttccattttttagtattctgttctacagacaaagatcatgtgtcagatcatgggtcacaaaaatttattcagaaaacatattctttcaagcctcctaggtcaagctcagcctttagggtgtgaaggtctgggatcaggccctggtctaacttctctaatggacttgctgtatagttcctagcagttacttaagttcagggcttcagttttattctaacatttcaaagataaggacgggctaggtgcagtggctcacacctgtaatcccaaggctttgggaagccaaaactggaatattgcttgaggctgggagttcaagaccagcctgggcaacatagctagaccccatttctatttaaaaataaaaactattaaaaatttcccgggtgtggtgcatgctcctctagtcttagctacgtaggaggctgaggcaagaacatcacctgagcccagaagtttgaggttacagtgagccatgatcgagccactacatttcagcctaggtaacagaacaagaccctgtctctctctaaaaaaataaaaataaaaaaaaagatgtacacttagcttatgcacttcacaggattattctgagaaacaatggaaaaactctaagtgaaagcactttggaatccgtgatcatttcacaagtgtttgtttctttgtccacatttgtatctatcatttagagggggagagtggttgaattcaaataattgttcggtggagtatttgtttttcatgtgtttttcatttgtttttcataatgttaatgtgatgcagagcgaaaagtaaagaagggtcattctaatcacaggttcaaaataatttctgaaaagacaaagattctattttaaacatttaataatgcattgcagatgcctagtaaatgttagccaatttttaaatttttatagaataatcgcatatctaaaatttaggttaataaagacagttttaaaaaatgtgtttcaccgtgacagatcaaacacaagggggcgtcttctacatttgttttaaaagatttcctgatgcagtccacatacaaaatggttttcattcgaattgcatgtgacagagcatacttactaaaatttattagttccaaatattacattctctacacatgacaattttcacatttgatgcataaaatactctccagagtgagtttataactccgttttggcttaaaaataatcatattttgtgacttaaacttagaaaattctaacaaaaagaataacatttactagacagtacgtaaatactctgaattttaaggctttaaaaaaataaatctacccaaaactttaaaatgtctctctctcatctatcccttttccctattttgcccagctattgtgcaaaccctagttgtcttgacaggttcagaggacacacagtttgacttaagaaatgaccaaggccttggaaggggaaatatacaatcacaatcctcttaggtatggggtatgtaaggagcaagtttttagaaaacacacaaaggttgagttgtattaaaaaaaaaaaacataggcttatcttctgcctttcatctggaactttgggatggatagaagtaaacatttaatcagagaaagataaagtgtgtgtgtctgtgtatgtgtgtgcgtgtgtatgtgtgcgtgaacccacatgcgagagtagtgtcggtggtaagtgctatgaaatgaaggtcaatgagacagggcttgtgaattaaggcctttgttaaggaagttaagaaaggcctttctggccgggcgcggtcgctcacgcctgtaatcccagcactttgggaggccgaggagggcggatcacgaggtcaagagatcgagaccatcctggctaacacggtgaaaccccgtctctactaaaaatacaaaaaattagccgggcatggtggtgggcgcctgtagtcccagctactcgggaggctgaggcaggagaatggcgtgaacccgggaggcggagcttttagtgagccgagatcgcaccactgcactccagcctgtgcgacagagcgagactccgtctcacaaaaataaaaggaaaaaaaaaaaaagtcctttctgataaagtgatattgcaaaaaactctttaaccccagatagcagcaatatgaaactggagcatgtttgatatctttaaagaacccgaagatgccaatgtaggtagagaagagtgagtgaggaggaccatagtagcatatcaaatcagaaaatgatcagggagctgattaggtaggggcttgtggttttttgtaaggacttggccttcactctgcataaaataaaaaggaaaaacagaacctaatgaatggttttgaggagattattgacttgatctgacatttgctttttaaggtactgttggtcctttgcatctactaggttcgtatccatggatttagctaactgcagataaaaatatatgaaaaaatccaataaaaataacaacatactagtacaaaattatagaaataaaaccaataaaacttaacaactatttgaatagcatttacattgtattaaatattataagtaatctaaagatgatttaaagtatgaggggatgtctcataacaaatactacgattttgtataagggacttcagcatctttggattttggtatgggaggagagttctgaatgctgagggaagacagtattatttcagatcaagtgcagtgaattgattccacgaagatgaaacccattaaaacactattccaaagttgcaggtaaggaatgatggtgacttagaccagattagtagcagtggaggtgatgagaaggaatttgaattctggatagagtcaaaagggcttgttgatagattagatgtagaaagtgagaaaagtagaggagtcaagaatgactccaatgtattagtcccaagcaactggaaaatgtaactgccattcacacaaatgtggaagactgtgggagaaacagatttgaaagggaagataaggactttggtttttatgaaatggctagtaggcattcaagcagagatattaaatagacaaataaacatatgagttgggagtttgaggatgaggccaagcctagagatttaaaaaaggactcaattatgtaaagaatgaatttacagtcattaggctggataaagtcctccaggatatcaggacaggaacaacaacaaaaaggtcttagtgcttgaaagattaagagtcctgcaaagaacactaaaaataatggatcattgagataagagaagaatattttaaaaagtatcccagagacaaagtgacaaacgtagttcaaggagaacataataataagtgaaagaaaatgtgtcggattagtcaagtaggatgaagacttaaaacttggggatcagtgatgaactcttccagaacagttctggagttgtaatgtgagaaaagtcaattatagtgggttcacaggagtgcaagagttcttttaacagaaacatagtagaccaaatatcctgaaaaagtcttcaaatgacctaaaacattgataaaatatgagatatgacaaacattttaaaaattttatggtggactgacaagaaagtaagagttttcttgagagccaacaattttttaaaaaattgaatcagaggtaagtgctgaagacaatagctgtcttggaagcatttacttggtggtttttctttctttctttttttttttttttttgagatggattcttgctctgtcgcccagactggagtgcagaggcataatctcagctcactgcaacctccgcctcccgggttcaagtgattcttctgcctctgcatgtaactaataatataacactgcaaaaataatttgacaaatccactcttattttgagagttcttttttttttaacaaaaaagtcaatagggatgtggaagatttgaacagttaagaaccttgagctagtcaacatatacattgaacaccgtacccaatggttaaatcatatatgtttattttctaaaatacatttgtaaaaattgaccttatatgagaacatgaagacgttttcaacaaattttaaggatttgattttttacacacccacattttttaactataatgctgttaagttagatattgataagaaaaatattaataattagcttgtatggttaaagtttaaaaaccaactcttgtgtcaagaaaaaaattataggataaaatagaaaatgcttaaaactcaataataataaaaacgttacacatgtgctaaatagtgaaacgaatgaaacaagtgaaacaaatgaaacaagtgaaacaaagtgagaactgttcatacaaggtaatgtgtagccttagatgcttagaaaaataaatgagtaaaccaaacattcagttacaaaattactctgagtttctcaacaggtgtgttattggtctttggggaaaaacaattctttgttgagcaggaatgtcctacgcattacaggataaataccaccctaggcttcacccgcctaatgcatattgcactccagggttattgtgaaaagataaaatacctgcacacatttttaaattctaccaagtaggtgatgctacctccagttgagaaccactgaattagacaaagaacaaaagactaaacccagagacagacatgtgagataagagcaaaaataaaaaagagtgaaaattaatgcacaaaaatgataaattacaggggtccaaaaaccaaaagttgtttctggaaaagtactactagtaaaattagtatgaaaatttgatcaaaagagattttttaaaaagaaatcaatataaaaagcaaagcagtctacataactgtagactcagtagagattcaaaaaataataaaatgatactatgaatagtgtaatgccactaaatttgaaaagataaaataaaatatatatataaatatacatatgtacatacatatgtatctcatatatataaaatatgtgtgtatgtgtctttatagtcaggaggaaatagaagatacaaatgttcctaaaccaatttgaaaagttgaatttgtatttttaaactttcttaccaataaataatttgcccagactatttttaggctaattctccaaaacatatatacattttttgttgttgtttttggagatggaatcttgctctgtcgcccaggctggagtgcagtggcgcaatctcggctcactgcaacctccgcctcccgggtttaagtgattcttctgcctcagcctctcgagtagctgggactacaggcacgtaacaccatgcctggctaatttttttgtatttgtagtagaggcagagtttcaccgtgttaaccaggaaggtcttgatctcctgacctcatgatctgcccgccttggcctcccaaagtgctgggcttacaggtgtgagccaccgtgcccagtcacatatatactttatatgcaatttccaagaggtctgaacaataagaacatctctccaactcactttatggagctggcatgatctcagtaacaaaaccagaaaagcataaatgtgagaaattaaattataggccaatttacccgtgactgttacggcaaaaatcctgaatagaatattggcaaaccaggctgacaaagtaaataagcaaatatatcacagtgttgagtttaacctagccgtgcaagattggtttacgattagagaatgaaagcatatatataaaaccatattaacaggtagggaaaggtatgttattgtctccatagacatagaaaatagtatttaataaatttgacatccatttatgataaaattacataagtacatcataagctgggagtagaagaaaatctctttcaccgtttaaagattatctataaaatgttacaaacattaatcgtgaaacattaaaagtgttccctttaaatttggaccaacacaaggaaattcactaccattttatctacctagtactgtaataaatgacttagccagtgaatatacctggaaaacttataagtcataaggattggtaaggaaagcataaagttgccagtatctgtgctttttatggttgttgatagctatatgcacaaacagatcaccaaaaagagaacttaacgaatatgcgggagatgacaccaatacaaaattaatgttgctaactaacaggtaggaaatgaaaatacaaaaaataaaagctactatttcccttatatctatatctgtaaatataatatctatctatatctatctatcatctatctctatctaaatttagatctattagtgtttgctttgtttccttattcagctccttagagaccaacatttttacattttaatctcctttgtctgtgttcatatttgtcactttctttcaaatccttttcactatttctccatttatttttgactactattttttttttttttccttatctctctcttaagtcattaagttacttttttggtttttgtgtctcttcaaactttgtcctcaattctgaaataactttttatttctggtatttgcctgagctttgtcagctaatttctgaagttttgtgactaatttatgttgcccattttcttacagtttcctagcccattttgaataagtaagttatggttttgatccatttttgggtgtgtctgtcaagtatgcttttattgcacataaagatgttactgtgctttctttttcctcaaaatatcttcatatgggatttgattttgagagctttctgtttgtcattgtgaaattgatttttctgaacttttaaaaggaggtagtgtttaagataatttttctaatttcacgaggtctctcatttggtgttttcttataatgctcaaaaataaaacagcagcttgttttttgtgaactttgtttctgtccccttttcaattttatctggaccttttaacgccttccatgttatcagtatgctgctcaatttttattccacttccactagtttctcttcaaagagggctctgtctggaagggaaccctgggttggtgcatttctgcaattcttagaggccagatggcttcagctccttcatctttttatggtgtgtcccttgcactcatggctattacacttgacaaaaacccttcccagtttcagccactgttagaaaattggccctccctccctgcctataaatatctgcaggctgttttcaaatgtttctcttcccaggtaaggaagatactgttttcccccaccctctacttcttcctacacaaatgctgaagccatgaagtcttgttcccattaaaggtttgtttttacttgcttgtgttttagggttgtcttgaaatttttattgaaaaatttgtgcataggattttaaatttggaatctagttgttctatctgattttagatggaaatgcatggagatccaggaactatggatgaatagttcctctgtcaatgctattatctgcccagaatcatgtctttaagtttttcaagagaaaagaagacttcattaatactttttttccatgaatgtaatagtggaaaatggttcaacttcaaattgtgagcattttaatattgctgaacttttactatgtggaccatttgacctattctttgtaagcaagaatggacagaagagctaggctaatttaagatgagaaacaaagtagagatcatatatccttggctcggattgttttccaaacccatttcagaagcatttgagagtaacagctgaactgtcatgccatgccctccctatcttgttactttgcaataaagatggtagagtggcctcgtgcttccctaggaagaaagccaccccttgttgactgaaggcttataataactcaacccaactctccaagacttctaatatgaagtttactgttacacagagcagtatcagcttaactattcctagtaatgtttttgccttaaacctgggactctgcaacatacatggaactcattacagaactttcatatctagaggaccatcttttggacaaagttgcgcaaagctctgaccagagctttcaaaattccatgtatatgtactgtattagtcagcattctaacacattcttgagattttcttcctctagaaccactctcagtaccaaattctgtattagtcagggttctccaggaaagacagagccaatagaatatgtgtgtttatgctgtgtatgtatgtgtgtgtatacacacacacacacacacacacacacacacacagtagtccttccttatctgcaggggaaacattccaagacccccagtagatgcctgaaaaagcaaatagtaccaaaccctatatctcacgtggatgaatttctttgtctttctttacatctccacagatagaaggttgattctgactgtagatctcagcaaccccagcatgtgatttttttcctttacttataaagttgagaacttttacattttcacttaaattaacactttttatggcttctctttggcttattcgaattgccaacatcacaactgttgcaccttgggaccattatgaagtaaaataacagtttctcaaacacaagcattgggataccacagcattcaatctgataatggagatggctactatgtgactcaccagtgggtagaatacacagcgtggatctgctggacatagagataattcacacattccaagtgggacggagtgagacaacacaagatttcattatggtacttggaatgaggtgcaattgaaaacttatagattatttgtgaaattttctacgtaatattttcggactacagttgattgcaggtacctgaaaccatggaaagtaaaactgaaaataagtggggtctactgtagatctatctctatctatctgtacacatatacacacaccttaaaatgcatacacacatcctatgggttctatttctttatagaagaaaattaattataaggcactggctcatgtgattgtggaggttggcaaatccaaacctgtggtgtgggcaagcagtctggagacgcaagagagccagtggtgcatttccaattgaaagattgtccgacggagacccaggtgagccaatagtgcgttctaatccaaaaactcagcaggcaaagacctaggtgagaccatgatgtggatgaaatctgaatgtaatctactggagaatttccctcttgctcagggtagccaatctttttgttcaactgattggacaagacccaccagcattatggagaggaatccacttcctcaaaattcaccattcaccaattttaatgttagtctcatccaaaccaccctccaagttgacatataaaattaaccatacattcgtcataggttggttcaaacttttagactagacatccttcttagcacctaacttgagacttaattaatgaaacaaaaacttcataattctcagggaaacagtgatttgtcttccatttataattgagtcacttctgtggggattcaggaaagaataagccaagagtggttctcaaattgctaccattcctgtattttctctttaacccattgtaattatgtatttatttggggctaacacacagacatgtatgtgatacaacatattgtggttacaggttcacttgatggtagttacagatttttatttcctggagaatgaactcaaattaatatgcaatggtgttattatatcttaaatacattccagatctcattttccatgttttataaaagagctccccttctttccctaaatttgcataattttcttattttgtatatgcacattatttctgtaaaaaattaaatctcttctttttaagattctccaaaacaacataaattatgtggtttttttcctgtaatccttatatattattggcctgtaatggaaagaagtatcagtctgagatcaagaaggaaggactgatttaaataacaagcaacgctgtgtaccaatgtaaacatttattaaattctaatcattcttatcccagtaatttacattcatttcttgcatatatgggtgcttaatctgcatgaattgacggaacagagaacttgtggtaacagtagcttgaagttcagttttttgttgtttgttttttaattgagacagggtctctctattgcccagctggagtgcagtggtgcagtcatggctcattgcagtccagccctcctggactcaagcaatcctctcacctcagcctcctgagtacctgggactacaggcacacatcatcacactcagctaatttttgtattttttgtagagatggggtttcaccatgttgcccaggctggtcttgaactcctaggctcaagaaatccaccctccttggcatcccaaagtcctgtaattacaggtgtgagccactgtgcctggcctcagtttgaagtctttcttcgttttacccaatactacccatcatcaccaatgtaatggtacctaactgattgtgattgtgacttgacaaaaagaggacagactatgcgtgtctctacttttgctgtgttggttcctcagctgcctttgcaaagagagtctttatggttacttaattttgaaggaagaagttctaatcattgtcactgataatagcatgtatcactaactagctgagctaaccagccacatatttgatgccaaagtaagtatccagtttgattgctaggtgtgcatatgggagttgtctgataaataaaataatttattagaaaacaagaaagcagactatccaaaaagccatatttcatgtgatatagatcgaggaaaaaaatcatttactaaaatatagaaaattgcttatatttggaggccaccataatttaaattcctgctctattaatttgaaatattctccctaaaaaactgatctgttttttgaaatgttttacaattcctctcttatatatctgttgggagaaatacatatatgtttaatgtgcttggtcaaaatcaacattgagattaatgaagtcatgtataatgaatctacatgaaataattcaattatgagaaagtgcatttggatgaatccaggaagtttactatttattttccttaattaatttaatgtcaagagggcttcttacaaaatttatgagactctgtgaacttaattgcttttcccagattttaataccatacggcgaatgtatcttccataaaaaattgaaattgttttcctcattttgatttgcaacagtggtatttatcaggctctgttttatagttctatagtatattttatttcatgagtgctcattattgatagttattagcaatttctttcaattttaaagtaattataaatgatatataatacgcatttttacttcaattcaaaataatgaatgagagggtagtactattctttttagttagtctaaatgtatacaggttgactttataaggacacaaacattccatcttcacagtgatgttagaaatcactgaagggttaacagttggttgtcactattgtctgggattttaaaatctgagaatgcctcaacaaaacagcgccaaagataatgtttaaatattagtgtttattaaagtcatccaagaaacactgcccagtctttagagttaactgctgttagattcagatttcttgattaaagccggaagcaatttaaaattttaaagttgggccagaggaaggtcttattcatacctttgccctaacagaaagcgaattcatatatgccacaccaaattatgggcatatatttataatattgaaaactaattctatttctttgtctttaaacatcttgttcagtaaacctgctgaatactgtgcaaaggatttggatttttataaaatcaagaactcttcaagtatttcctctaccaatcaagttttcatttctgttctgaagactcagttatcttttacttcttacatcagttagctattgctgagtaacaaattactctaaaaggtactgtcttaaagcaacaatcatgtattatttctcatgagtttacaggctggctgagcttgcaagtttacagggtgtgctgattttttttttttttttttttttttttaaggtggagtctctctctgtcacccagctggagtgcaatggtgcaatctcagctcactgcaacttccacttcctgggttcaagcgattctcttgccaaagcctcctgagtagctgggattacagttgcccaccaccacacccagctaatttttgcatttttagtagagacggggttacaccatattggccaggttggcctcaaactcctgacctcaggcagtccaccagcctcagcctcccaaagtgctgggattacaggtgtgagccaccacacttggctgggtctgctgatcttggctgggcttggctggccaacactacactcattaccactaagtaacaaacaaatacagatttgttctcatctctggaagttcatctgagacccattcacatgcatatctggcagtcaggtggctgttagctgatccaggatggtctcaggcaagaaaattttctgtttcatatgtctctcattcctcaatagatcatctgtgtcaggagtccccaagactcttcctcagagtcattgattctagcaggaatcataggacttctcatatactcatactcatggctatgatttattataggaaaaggatacaaaacaaaattggcaaaatcaaaaggcatgtggggcaaagtcctgagaaaaccaggaataagctcccaagagatctctctcagtggagttacacaggatatgtttaattctcctggcaatgaattgtaaccacacatttgaaatgttgtctaccagggaagttcattggagattctgtgtccagagtttgtattaggggctggttacataagcaccctctgcctggctcataccaaaactccagaatctcagaatggcagcaagtattcagcataaaccatgcggtttgcacagtttaggtctagtgagacactcttaccaattagagtggtgggaacattcccaaaatccaagtttccagatgccagctgagggcccatcttgcacgtaggtgtttccaaggatagcagtctcaggcttgctatgttaatgcttttctggatattatcccaggcttgtattctgattaaggcaaagttccaacaggcaagtggaagctcaaaaggtctcttgaagcctaggctaggaattggcatacattgacttctgacataacctattgactaaaatgactttcaaggttcaagaggagaggaaacagactcaatctctttattggagtggttcgcaagaccacatcatgaagggtatggatactcatcatttgggaccataaatgcaattaatctatcatgcttcccaaactttaatcctttgccttacagttttgagaaacttatgacttgccctgtcctatccatgcagttccatttcataatgagctttgatcacaatttctttccaactacctctggataagattcttagcattttccaaaaggtaattcttaacctcggttcactatggtgtctgttgcaaatctgaatgccttgggtcagctgtttggattctgtaatttctttcttcacttgtaaagtgtgggtttgcagtaaaacagccgcaacctctcggggatttgggaaatcactctttaggcaatccagaatgaatctccatcaacttcagctccagagactcaaatgtctacattctactgatgaactgcagtcactgtcacacccaagagatttgaaactcaactggactgagttctctaaatagcagccaaatccaggaccaatcccatctctaggagtctaagtctgtaactttccaagagcttatccagagcttcttgggcggctggtagagaatactttaggaaaaattccaggacagtccagtacagatcccaaattctggtttggggagagactaattgcatggaaattagaaataattgaggcccaacactcatttcccttgacatttttagtctagttatgttcaaaccagagcatgtcactagtaggagaacttgatggcttttattggtaaaatggcacatatgtagcagtttctttttagtggagtacagtcttaatacccaaaatagcagatattagcatggactttagaggaacattcctcttaggactctttcccggacaatataattcctccccacgacatttccttggcaggacaatctgactaactttgtctcagcccagacatgacaacactaactgctctttctcctgagctaatgatcttctctctctcattaccttcttcccacattcatttggccttacttttaaagctaattcaacaatgtcatccctgatataatgactcttgaataaagcaccattcctttcaatgaagaactgtgtataatattttaaaggtggaaattttgaagtgaattttttataaaaaaaaaactttttggttctcaacaaacactgttaagtgtataatttaatattcaaagtaaagctacacaattgaaaagatgcttatattttataaaaactagtctattctcagttaagacctcaataagtttaaagggcaaaatagttttttttctcatctgaatgacatgctttgctaaaattgcccagaagacagtacttgtctgattgtgcttcaagtaaattattttaaaataaatatctagcttacatttgagtacttattatggggaaaaggcattacatagaggactttacatatcttatcatatatatcagccatatattaagtaacctgttcaggggtactattttgcagatgaaagcctcagacttacagaggtttagtagcttaatcaagaacagactgaagttgaggagagccaggttagcactggaattcaggtctgtctgactcaagagaccaagcctgacttaaaatagtcaatatacttggatgtattccaaatatcaatacaggcatgcatgtgcacacacacacagatttagacagtatttgaacactttaaaaacgttatccccaaaatgactttgtgattctgaaaacaagattatttaatatgttaatcatgtgccataactctaaagaagccacttaaatatgttatactgactatatcctggaatgttccctcagattctaagacttagaagattgttgctaagatgttgtttctttttccaaaatgatgattcttggcaggcagagtatggttttattcacaggaacattgtcttagggaaatttcttggtaggaaaattttgaagagaatttatagaaaatgctgcatagaaaacttcctttccaaggcaggctgtaagaagactggccctgtcagaaaaaaatgcctaagaaaagattccaaaatgaatcacagagactttcttaaaaagactataataaatattacaaacatacaccctcacagagtgatgaatttaactttactcaatggaattttatcaaaagcataatagagatatgctattatggttcctttctttgtttacttaactatttctggtaggtcttatccatgaacttgggtaatgggaagccccgaatagggggaaatatattgttatttagataaaataattatggatgtattaacttgatgactgcatgaacatcaaacattgactttaaaaagatatttgggaaagtaaaaatgttttcccgttgagatctttggaagaaacagaagtggtaacccccaagaaggcactttgattttgagatgcatcaatttcccacactccagatcatctagaactcagagtgctgttaaaggaagaccctctagtgtccagggtgcatgatggaacgttagtgaaagtcatggaaccaggtgtatgcaatagttcagagagaggaagtaagactatcattctaccttggcacaataaaaatactagctagcactcatttgaagcgtgttaaaatccaagaactgtattaggtatattgaatgtattaacttaatacatttctaaagtacttttttctctcccttttatagattcagagcctgaggcaatagattaggtaacctgtctctgctaacacagagtcaatgtaatatagccacttgaacactggcattgttcttttgaatcttttcatcctattcactcactatgctgcgtctgaaataacatcagagctgatgggtttgagcacttagctttgaaatcacctttcgttattagaggcccaatgcactctccgtcacactacagccacctatgatcctagacacatcctacaactaggaagagaggaagaaactaagaagaactgaatgttcccaccaagcccaaatttgtgtcactgcagtgatattccaggcaatataaacctaagtagtgcagaaagagtagccccttgagaaatgacctactgcacccaaaaccttttccaaatcttggccaaactactccacgtcatcaaaaagaagccagaaaggaactccaaggtcaggactctgtgcaccacagccatcttcttactacacatatctcttaacattctattctatttttctccttttttttttttccttttcctgggatggcttatgtcctgccaattctctttccaaagtctttctctccttgaacttactgccaaaaggcattattaaatgtgcttttccacactggaatggtgagggatacaaccagaagaaggagtccttatcctgtctcttttccttctgatattttcctttgcatttatgatgactattttcaaacttacactcccagtgactgctttctgtgccagttctctcatttctacccatatcccactttcagaacttaagatctgggatttttgcttgaaagacagtttctgcaaaacaacttatttgccaacattcaagcaacaagttcaataaccagaaagcaaacataaataaattcaaatttctagatacaaccttacattaggaaaatccaatgtggagcacagagggttcagttatgtgatgtgcttggttcccctcatcattcccagccatttggagaaacatttaagatgacctttccaagaataattctctcagatgacaaccaccagtaggagaagtctttggaaggtctccttggagaaccatgggctgtattctttgttaggatacctctctaagctgcaaggtattaattcagatttccttcccatgcattgtgtccttgtttacacagagacagtttttctccaactataagaacatttgatttataattctgaagggccacatgttttaaaactgtgtttggaaaatttccccagccttcatgattttcattttctaccttgcaaagtgagcagcttataccaagccattccagtttagcaccatagtccatatgcagagcttgggctgtgttagaatgataacattgagctatattttagaaaaaaaatatgtatagaaaaaaagaattcatccacttagatgagtcaggtgtgcagatacgaccattcaggcagcacaacaccgaactgtcattttttgacactatgaaaaattttttatgaagacatagttaaagaattctgccttatatgcaaacaaatacgtatataccagtagaaagcttaaatgtggatggagttcaatttctctaaatatatgttttaggaccataaaattaaacatcaacaagaagttaggctccaaccatttcacacttcaatttcttcttatttaccaacatattatgtaatttttacttcatatctaaaaatgttttctatcattcatttattgaaattgctgaagaattttttatattttcaaatataattttatgtaatttcccctctgtgtaaacaatttatgcagattttatagatatcaaattcagaatcaaataatgataatcaaggtttgagtggtgatttacctctctgaacacattgacctgtctcttgttaaaaagcacatcaatatttgctaagtatgggatattttaatttaatgaattcagagttttaaaaatcaaggatttctagtgtttgaaaaaaaaaaaattagaaaatcaggccagatgcagtggctcacacctgtaatcccagcactgtgggagaccaaggtggttggatcacttgaggtcaggagttcaagaccagcctgaacaacatggtaaaaccccatctccactaaaaatacaaaaattagctgggtatggtgttgggtgcctgtaatcccagctactcaggaggcagaggcaggagaattacttgaacctgggaagcagaggttgcagtgagccaagatcatgccactgtactgcagtggagtgagactctgtctcaaaaaaaaaaaaaaaaaaaaaaaaaatccaaatattctggaattctcttcaacattttgactaattaccacatggccttgtcatagtcctagaatgtcagtacctgaggaaacttctggttggaaaagcttttttttttttgcactcaggactaaatttctctttttggtttgatttttttcctctgagccaaatttgaataagcctggtaatttttacccaagataattcctcacatatttgataatagctattccattctctataaaatttatctttacagaatgtttgtataagtcataataaataaaactaaaaaaactaaagacgtgatttcttcaagttcatgtaattatattagacccatgttgttatattttacatattgaaaagaaaaataaaagtaaaagtcaggactagaaaaacattagtagaaaacaaaatacatatttgtttttaaagttaaatttctcaattaaatattgtgagcatatcagatatctaagtgtactattgtatcattcaaaagtctgcattatactattaatataatctaaatggttttaatagtttctattttcaaaagatctagtaataggcttaattcagtataaaacatctaccatatcatttttatctttattgatgaaacacaagacatggacaactgacccactgttttacaaaagtgatttctttttgtgatatgagtgcttgtttagtctaaaaataacaaagctaatgttaaaaaatataatagactattctgttggctttgctataacaaatggaacagtgtatcacttcggatgtacttgtcattattgaacaaaacataaagttaatgagatggtgtccttaagacataagtatggttctccagatggtaatgaatttagactttagtctctcttctcggcagactctcatatctaatttgttgagattttgcactgctttcttatgaattattctatttgacaggtaatatgacataaaagatttccttgacaggtagtattttagaaatgtaatatttgtaccttttatttttaaagggtgggccccttagatcatttccatagatgaagtaacatcatgaaaaaaataaatgttctttcctggccttcaatgttactggtctcctattgatgcgaatgtaagttattaatgcattatttacattgttagcaaccttgataatatacggggcatctgaatttatctacagctttgaaccatcatctccaaagcctctcccatgctttctattttccttgaaaatccttttctgtcttaacacatattcacgtttgtatcttattagctttattttcttgtttttttttttgagacggagtctcgttctgtcgcccaggctggactgcagtggccctatctcggctcactgcaagctccgcctcccgggttcatgccattctcctgcctcagcctcctgagcagctgggactacaggctcccaccaccacgcccgactaattttttgtatttttagtagagacggggtttcaccgtgttagccaggatggtctctatctcctgacctcgtgatccacccgcctcggcctcccaaagtcctgcgattacaggattaactttattttcatgtgtttcataacgctgactgctaacccttgagatctgaacagttaagtttatttatattttgttttcacatttgtatttgtcccatgattaacgtaattgttcttgacttgagttgtcttgatgttagcagtcaagttggtgaaggatattaccaacaaattactctgcttaaagtagctgtactcagttcgggccaaatattagccgtcagttactgttacacgcaattttggggtcacttcctgacctcttattcttacgcacaactgccgtggatatcagcatcagtgcaactggaactgagcgtgagtgtccagctaggacttggcgtggaagtcactgacagcagaacttggctcaggatttgtttaaatggagtagctcatgttggactacaggaaagaggaaaaagaaaataaaggaaacttctgcctattttggagttgtctagcaggacaaaatgcttgaagcttggaatatgaaacaaatgaattacagaagattttgtgatatgacattaaaaatcagaaagcctacatgataaatttaattccttacaatgaaaaaccacccatagaaaataagtaagtcaacaaatcaatcatgttattcatttcttatctttttccagcatatcctgaaatgtgctcaagggcttcccagttttccctttcaagtcgactgtcagcaaaggattctgattttatccaatgtaaattctttcatacccttgtctcttgctctcaaatgcctggcttcatactttctgtcacagatgtgaaggtgtctttcttcttaaactctccactcactgactctcttgatcttaatttttgtatttttagtagagacgggtttcaccatgttggccaggctggtcttgaacttctgacctgaggtgatccacacacctcagcttcttaaaatgctggatttacaggcatgagccaccgcgcctggcccctgtgcattctttttttttcttttctttttttgagacagagtcttgctctgttgccaggctggagtgcagtggcacgatctcggctcactgcaacctccgcctcctgggggttcaagcgattctcctgcctcagccttccgagtagctgggactacaggcacgcaccaccatgcctggctaatttttgtatttttagtagagacggggtttcaccatgttggccaggatggtctcgatctgctgacctcgtgatccgcccacctcggcctcccaaagtgctgggattacaagcgtgagccaccgtgcccagcccactgtgcattcttaattcagatattggagagtgagatctctctgatgaaattcactggacgaagattttgccctggattacctgatagactggagttaccctgttaaatgtttgtctttgataaccagtcttggtccagtcacttctgggctgaatgaacaggattatatgataataaacattgatatctacagccatgaagatgataaaatagcttcatttagtcaggtcggggggtgtttccagccaggttttgagtgtaagtttgtcattttctcctctgccatcaaatttgcacattcccagccagtgctccacccatcttgagatcaaaatttaagaagcatcaaaacattcactaatcaaggtaaataacattttaagtgcaacatttaaaatcaaaatttatacaaaaaaatacatggtgaacaaaatatcaaaatgtattactggtttttcctgttcctcaggcttcactatggcctggtttggcactgatcccaactgctccaactaaaataaaataaaaatgtgccctttttagttacagttttgcttgttccttcctgcaagcctgctaagtctatttctttgaggtctatttctgctgaatctgttttgaaatataaatatttggacatttaattctatatggttaagagacttcctaattcagagcagattttgtgattatacatagttaggaaaactctcactagatagattcatggttcttgctaaaattgaaggtacagataaaaggagaaagaagcaaagcataaaaaatttgaaacaatggtgtaaaaatgtgttggggaatcataatagggctcagggctactgagaaaacataaatgttctctcttccccaccaaggtcctgattacccttgaacttgccatattattcaatgatttagactggctcctcttggttgaaacgtttttaggaaaccaggttctcatgattccctcacacccctgtctcatgcctcttattttttttattgccattttctctttctcccaccttctcaagaaacgtgtaattcaaggctcaatcctcagaattcttgcttttctttttcattaccttaacaatctcattcaccctcacagtccaattttcatccctacagagatccctccagaacaacacatctccagccctggacttctctatttctaacagttcttgtatttgtcctttgtctctaccgctccaccttaccttcctacatgtccatatcacctcacagctagacctgtcacctcacacctagacctgtatgtagggtataaaaaatgtgcatgtagttggccaggcatggtggctcatgcctgtaatcccagtactttggtaggccgaggcgggtggatcacctgaggtcaggagttcgaaaccagcctgcccaacatggcgaaactccatctctactaaaaatacaaaaaattagccaggcgtgatggtgggcacctgtaattccagctactggggaagctgaggcaggagaattgcttgaacatggaaggcggaggttgaagtgagccgagatcaattgcgccaccgcactccagcctggcgacagagcgaaactccatctcaaagaacaaaaaaagacggggacatgtagttagctccaaaaccagtcttacttttttactttattgaaggatatcaatgttttatttgcttgagataagttagttaatatacaatttcatttatacagtttttttatttattttatttttttattttttgacacggagtctcactctgtcacccaggctggagtgcggtggtgcaatcttggctcacagaaagctccgcctcccaggttcacgcattctcctgcctcagcctcctgagtagctgggactacgggcatctgccaacaagcccggctaattttttgtatttttagtacagatggagtttcaccatgttagccaggatggcctcgatctcctgacctcgtgatccgcccgtctcggccgcccaaagtgctgggattacaggcgtgagccaccgtgcccagcctatttagttcttatagagaaggaatatgttaaatgaattgttatcttaaaataactctttagggaatggtgagatagctacaagaggtatctgctattcaggtctgaataccatctcacctttaaagaagaatatccttataatgaagcattgttctttctagcctgttcactaggtagagaagcaaacatgacagggagtaaatcatacattttttcttctgagagtatttcttttttatttatttatttatttttaaattttattattattatactttaagttttgtggtacaagtgcacaatgtgcaggtttgttgcatatgtatgcatgtgtcatgttggtgtgctgtacccattaacttgtcatttaacattaggtatatctcctaatgctatccctcccccctccccccacgccacaacagtccctggagtgtgatgttccccttcctgtgtccatgtgttctcattgttcagttcccacctatgagtgagaacatgcggtgtttggttttttgtccttgtgatagtttgctgagaatgatggtttccagtttcatctatgtccctacaaaggacatgaactcatcattttttatggctgcatagtattccatggtgtatatgtgccacattttcttaatccagtctattgttgttggacatttgtgttggttccaagtctttgctattgtgaatagtgccgctataaacatacatgtgcatgtgtgtttatagcagcatgatttataattctttgggtatatacccaataatgggatggctgggtcaaatggtatttctagttctagatccctgaggaatcgccacactgacttccacagtggttgaactagtaaatcatacatttaaccagaaatacatgtatttgctaaccttgtttcttgattcatttatttttttcaacattcaataaatatttttttttagttcctaccatgagccaaataatatactaggcactggcacaggagtaggttttatagtacaggagtgaatacaagagtcaagaatatatttcttaatgaggctcacattttaagacaactcagccatattagatggctataggtgctcaagagaataataaagtaagggagatatggagtgaggagtttgcaatgttagttaagatagctgagaagatgatatatgagaaaagaactaaagtgtagagttaaacatgcaaatatctgggagaagcagattctagacagaataaagagcaagggcaaagactgaggaggaagtgtgcttggcaagtttaaggaacagcaactatggctaaagctgagttaatagaaaaggatataggataagagtaatggtggggggtggtcaaatcaggtaaagccttgttggacattgtaaagaactttggcttctcttttgagaaattggaaaggataattctgaacaaagaacgaaaagaatttccctgtattttaacaggatcacactggtgaaaattcttaatagactggagccgaatgagaatgcggaaatggaggtagggatgcctatttggagggtactgcaatactccaggtgacagatgttggtggcttggaccaagatggtggcaatagaagttgtaacagtgattaggatagggaattctttgaaagtagataccgtaagatttactgatgatctgaagtatgaagatatgaatgaaatgtgagaaacagagaggagtacaaaataactttataaattttggactgaggacttggaaaaagaaactgccatttccttagaaggggaagcttcagaagacacagatttttgtttttttgttttgttttgtttttaagtaagggtagtggtggcagggaagggagataaggagttcagtttaagacatgcttattttgaaatgctcttagacattcaagtagagatatctaattggtaattgaatagaggagcctaaatttcagggaagagttttcagctagagatacaaacttaaaagttcttgatataataatgatatttacagtgagaagacggaaggaatcatgaagacagttagtgaagatgcagaaaaagaaatacactttttttttttaagactgagtcttgctctgtcacccaggctgcagtggcatgatcttggctcactacaacctccgtctcccaggtccaagtcattctcctgcctcagcttcccgagtagcagagattacaggcacatgccaccatgcccaactaattcttgtatttttagtagagatggggtttcaccatgttggccaggtctcgaactcctgacctcaagtgatctgcccgcctcagcctcccaaagtgctgggattacaggcgtgagcaacgtgcctggccagaaaaacacaattttaattttatttattttttcttttaaaaaatgtatgtttcagattcaggggatacactgtgcaggtttgttacaagagtacattgcatgatgctgaggtttgggcttctattgatcccatcacccacatagtgaacttagtacctaacagggagttttttagcctttgctcctttccctccctccctccttttggagtttccagtgtctattttttccatctttatgtccatgtgtacccagggtctagctcccatttttaagtgagaacatgtcgcatttggttttccatttctgctttaattagcttaggataatggcctccagctgcatccatggtgctgcaaaatacacgacttcatttttttatggctgcatagtattccatgttgtctatgtaccacattttccttattaaatccactgttgacaggcacctagggttgattccatgtctttgctgttgtgaatagtgctgcagtgaacataggcgttcacgtgtctttttggtagaatagtttatcttcctttgggaatagacccagtgatgggattgctggtcaaacagcagttttatttttggttctttgagaaatctcccaattgctctccacagtggctgagctaatttacatttccaccagcagtgtataggcattcttttttctccacagccttgccaacatctgttattttttgactttttgaaaaataataaccattctgactggtgtgagatgttatctcactgtggttttgatttgcatttctctcatgattagtgacattgggcattttttcatatgttagttttggccactaagacataatttttagagattagggataggagactgtgaaaggatagccagtaggtaggagaaaatgagaaatatggttcctggaagccaagaaaagacatactttcaaggagaaaggcgtgatcccatgtcaaattctacaggtaggcaagtaaaatgagggcaatgggtgactgactgtcagtttgtctctcgggtcacgttcctaaaactgcttaagaaagggccagtagagaaacggatttaagaagtgcgaataatttgccggtacatttatctgttgtgtcccagagtggcttcgcctcataagggtgtgtgaagccacgctgggattttcttccttcctcacagttccaggagggacccgcccaaagtttagttcagaaggatggctttctcctgaaaagaactttcctttgttcgaagatacatgtttctccatcagtgtctccaaacaaaccctaaagattcatgacaggggagcaggatttcttccaagacctctatgtaacttctcaaccaccacaatgggcctctgtcgggtctttaggggagatgagaaacgtccccccctcaaaaaaagggttatgcacttgtgttttttcaagctgtcattaaaaaaaaaatgtaagcatttaataagcagctacaaagcaattacagactgaaagccacctctttataaagcagcagccataaagacaatggacactgtgtaatgacaaagcaacagctgcaagattcacggggaacaaggagggccatgcacataaagcataaagcggctggaaagtgtgggtgctgctgtgcgtggttggagggggccgtggagaggctttatgaaaaaggagggggaaggcaggctgccaaaagagttctttctctagagatagctagaaagagaacataaataaacagtgactcattctgtgtgatgctataaaccttgtccagcagaccttatttacgtaggagagaggactctgatgactccagttgtttgggagaatacggaagaactattggattgagccctaatttgactcaggttaccagtccctaagactgccagttttactttctttgggaaattttaggaagaaagcaaaatgcacgtaggacaaatagagactaatgtgagatgatgacaatatccagaaattcatatttaacttttcaaggaactgcttatcaaacctatttctaaatctttgaaacacatgggatttctagttgaagatttctgaacaaagtcaactgtctcttttattcagtcaaataaatcataagcaaattagacactaaccgacactgtgctcttaatacaatcatccacaacatatttcctgtctatttctgtaactgtctatttatctctccattcatttatcatatatgtaaaagattggagaacattttgacatttccctatacaaataaatgcagcctatatttctgcttgtttcagagtttctccatgaaactacctcagaaatagattctccagtttgcacaaataagaaatcaaatcataattacatatgctcttttctgctgatatttatttggtgttttcatatgtcaacatttaaaaaatgacagctctttttcttccagacttatcaagagattttccttctttggcctaaattctttcttacaatggtacaagatttaagaagaaaaaattcacaaatacgtcctgatgtctactcactggtttactggtttagggctgatagtggcatttcttttctagaaaactgaaattacacagcaattcaagaaaggaccacaatggttagaggcgaaattccttttccaggaaagaagcaggacagtactggcaaagtgtgtcaacctggctttgcccagatttggagcatgaatcaagtcacacagtgtggcttctgtgtgctctacccactccaactatgaactgatgtttaaaatttgacatagaaatcatgttaacaatgcaaagagtcttgatgagaacacatggagacatagaggggtagaggggaacaacacacactggggccttttggagggtggagggtgggagtagaaagaagatcaggaaaaataactaatgagtactaggcttaatacctggatgatgaaatgatttgtacagcaaacccccatgacgcaagtttacctgtgtaacaaccctgcacatgtacccctgcactttaaagtttttttaaagcaaaactcaacaaaagtcctaaaaattacacagcatcaagggagtaatagttttaaaccctgaaaagcttagtgattttcttttttctttttctagagacagggtcttgttctgttgcccaggctaaaatgcagtggcattaacagctcacagcaggttctaactcccagactgaaaggatcctcccatctaactctccccagtagctgggactagaggtgtgtgctaccacaccccccgccctttttttttctctttagagatggggttttcctatgttttccaggtggtctcaaacacctggcctcaagtgatcctctcaccccagactcccaaagttctgagattaaaggcgtgagtcactatgcccaatctgatgattttcttgtttcttgattttcttttattcttgtaggccagttactgccaagttgtgctatctctactgcttgacaaggtagtagcagggatatactattctatcttaagaaacagtggactggaaatctataaactattcctttgagcttttattatttgtcacttttttgtgccgagcatgagccctaacctgacatagactcacccacagatgcctacacagcaatatacgtaaacacacacccactcgcacatacacaccgtccacaggaaagtgtcacagactccaatcaatccacatttcccatgtccactgtttctctggcccgaaccatcatcatcctgcagtactgcctggtgaagtgtgtggttcccacagtcagactgatgtggtttgaatgacagttaaaccaacccgccaagggttgcttgggcgggttgcttccccttgctcctctgctcaacgttgttagttttagcgcctgcctgaaaagatttgtgaagacgaagctaattcatgtaaagtgtttaacataggtgatgcttaagaaatatcacctctcattattggaatgtgtattggtttcctactgatgctgaaacaaagtgtcacaaacttaaccgcttacaacaacacaaatttattatcttacagttctgtaggtcagaagtctgatgtgggtctcactgggctaaaatcaagatgttagcaggagtacatttacttctggaagctccaagggagaatccatttccttgcctttttcagattctagagaccacccacattccttgactcacggcccccttcctccattttcaaagcagcaacactgcatctctctgatccatcttccatcatctttctaatcacagttcgtagaggttttctgggacttgtgtaactacattgaaccttctagaattatctaggttaacctcaaggtccataaccttaatcacatctgcaaagtcccttttctcttgaagataacatattcagagcctccaggtttgggacatggtggacatctttgtccggaaggatattattctgcttaccacacagggagtgttactgattataaatctgtatgaaaaatgtgaatgcatcttcattggattggctgtcccatgtgtttctatccattaactcctccattaacatcatgttctgatagggcaggctctatggtgatcaagtccatgcatgcatgaaactggaaacctcatggagttgtcccaccatcatggcgcaaaaagcacagcaaattattttaaactagcctttgatacggaacagatacatacaatgataagatctagatattgaacattcacttatttgctttttcaatcactcaacaaatatttatcaagtgcttaacatgaaaaagccactccacaaaaggaaatctcaatttctgtcaagctttcaaagctataaactatgacatcatcctttctcaaacaaaccaaccattataaacatcccagaataggctttatgaagccttctctggagaagggctcttaacctagggcatgtgcagaggctccagtagtctgggatttcctgttaactgcatgacaaattgtgcatgtctgtgtgtttggggggcaggggagaaggtccattgttttcatctagttcaaaaaggggtctataatccaccgaaggttaagcgtggcagctccagggtatcactgtttaggatgctaaagaccttactgcccagtttctccatttcgctccagaaaatttccgtgaaactaagcaaatggtattaagtacttgggctcaccccttgagttactgacacaccatcacatcccttgcttttctgcttctctctgctcacttattaccctactaatgagcgcagatacctctgcttaactatgttctgtgtgacaaaggaagattaagagttagacaatggcagaacttgaatatcagttcttcaagttctaaaatctcctttccttttcctaccctgaacaattcctattttgatagtcccattccctctattatctacatccagttatatactataaatcatgtgtgaagagaaggtatgaaaaccttctgggaagaggattgtatttaaacctaggacctgtccttcccacatcaaaaaaataaataaataaaatcaactgaaaaaggaagtaaacaaagtgatatgcttctacatagattgaataaagaaccacgcctttctgctgccctctttccaaagcagtgtgtttgaaaaagcattacttctttcagagtacaacacttgattcctctaggtcaagggcaaccgtgggtggtttgggctgtgctcacatttaggaatgcctccagttcaggctctgcagacctactgccttaactctttactgctctttcctcccccctgattccaagaaaagcacgaggacaaaacattgagtcccatttctgaatatttcagttgttctgtgtggaaggtgctgccaccctttccaggccacccttctcccatcagattgcagagcagccctgactgaccttgaagagtcactcccaggcccttggatagctcaccctgcggaagtctcaaagtgggtggcaagtgggtgatatgccttacggagatgtgtatgtaagtctatgcactcatacacagtgtacatggttgtgagctgagcccatttatggttttggtatgtgttctttgtttcatcacttaaaagagtgtcccttgtctctccttcccagtctcaatggtcccattgctcattaaatcccttcccatatacctaaccccatctacctgcatttcctgggcatgacgtgagcagaaactatgtcttcatctgttgattttatgtcttaaaatccatttaattttgctgggctggtggtaccaggagcagatagaatgagggagacagaatgagttagaagttagctagagctgggtttctaagtgacctcattgaagaggatgaacataataaatatgtaaaatatctgtgattttatagcactttggggttgtataaataaaagagtaaactatacactgcatttttaattaggaattgagtgtccacattgaatggattcatttttatacaggactttagatccattagatgatctctgcttactgcctcgtctgtctgcaggatcacatgatcacacatgatgttacttttattttaatccattcggaaagtttccaggagactgagaaagagaaaatgctcatcggggagtttactcaacattgcctagttttgttatccatagaaaatagactggtggaagtggcccgcaaagtacacaaccaggtcagggtcccacgctctgttcaaattctgttttctcgttagcagacttcacatgacagagccctggagaaggacagcacttgagcaactttcaactatcgcagcatctgctaagagccagagagagacttgaggagaaaacgactgtgaaacaaggatgcaatgatctcaaattaaaaacagttacatgattaaggcagtggcccgcttaccacagcctcaggacacactggaaagcttcagccattcattaccattcacatgttttgtccaaatggcaaaacgtttaggaagaaaatgttaaggttccaaattctaaaatactttttcctacattgttcaattcctgatttgaaatagtagaagggggaaaaacatttcagctgaaactgaatgcattggcaagctagagattatcaaaagagggagaatgaagagaattttttacaggcactggtggagagaattatgcaacttcccactacgcaaacttttgtaattgtaaattctgctaccttttaaggagaaaataccatcagcctgcaacttgagagcttttatgagaaccaggaaagggattttccttcactcacatctgtcttcatttgctgagtgtatgctgcagatttcatgctggttagctcagtctaagaagtagaagacaactagcattaaatcaagcaaatgcatgtgtccttatttttaaaaattacatgaaaacaaggcttgccttggactatatggtctatttttcccaatagcaaaaggtaagaaagtcaatataagcaaattcacaggattgaagtagagacttttccccatttatgtgggtgaaacaaaggattatctttcaaggacgtttctagacatctttacacgtttacatttttatatagataaggatatataccattaaaatgtgcatggattttttattttggcttcttccatactcaggcatttagtatcgtggaatcatagaaactttggttttatgatgatttcagcaggatctcaaacatgtttttaaaaatcacttctttcagataatccacatcacgaactttgctctttgattttatctgtgcatcaatatttgctaatcactaaattttctaaactaagatatccatatttccaacaggaatttatctgttaacacaggatacatgacagattgagagaaccatgtacatacaatttatctttggtgaatattccacagactttattttctcaggtaattttttttcccaattagaccattcttaacatgctgaccactagaatgaaaagtgaaaacttgaatcaatgaacaaataccaaatcttgggaaccatgataacccaaacacaaatccctgtggattgaaggcctgtataggaaggggtgagatggttgtggggatgcagctattaattatgagggaggttcttcttctttttgagatggaatctcactctgttgcccaggctggagtgcagtgatgcaatctcagctcactacaacctctgcctcctgggttcaagcaattctcctgtctcagtctcctgagtagctgggactactggcgcatgtcaacacacacatatatatagtttaatagagacggagtttcaccatgttggctaggctggtcttgaactcttgacctcaagtgatatgctcgccttggcctcccaaagtgttggaattacaggcatgagccaccgcacccggcccctgaagactcttcttaagggaatgtaatttctttgtagaaatgaaatatcatgtaatataaaattggcaatataatctgagttctaatattacagttttggttgttatatttaatatttttaacatgattatacatctttgaatctaacaaatatgcctaattgaagaataatttgtacagttctctatttgatgtggcatcactttaattctgaaattcaagaaatatcttagaacatttgtaaaaatcagcagttacgttaacaataatacaagtaagaaatctctccttggccctgccctgcctcccctgatccccatctcccttcattcgtgccttgttttcttatccttcttttgctccttccttcccaacttgagcataaacctgcttcttagttgctttctgtattgggggaaaccttttgctgttttctggaagcaacaaatccttcttaatttgacagggtattgttgagcctggaagcagcagacagtattgtgtacctgcctttattaatctgggtacacattttagaagttgcttgggtaatatcatgtgggttccctttcatttcctttcttggcttgccttatctcacagttccaccctttgccatgaatgtcttctcctaacttagaaaagaatatctcataagacagaaataaacatgaaggcaaaagagaagaataatttttggagtgacgtattttagccaattttttttcatctctaactgtagtttctgagattcctcctgctcccaatttttagaatccattcttttcttttgtatcacatatagcattgattgcacaatttttaaataattacagacaattatgtggtatttcagtgtgtcgggcacagatctaataataacattcaatcctcacaacagctttacggttactgccttcactttacagatgaggaaactggggcttgcgtatgttaattcttactcaaggtcagtccgttaataagagatggagctcagaatcgtactaagttgctgaaacagctgagtctctgctattaactgctcctccttgataatgacttgcccaagataatgcagcaatcaatagattagacattgtatcaggagtctatggcttctcttattggattagttcctgatatggtttggctctgtgcctccaccaaaatctcatgttgaattgtaattcccagtgttggggcagggagctggtaggaggtgattggattatggggacggatttctcccttgctgttctcgtggtagtgagtgagttctcatgatatctgtttgtttaaacgtgtgtagcaccaccccctttgctcgcttcctcctgctccagccatgtggacatgcctccttagtcttcgccttctgccatgattgtaaatttcctgaggccttcccagccatgcttccggtacagcctgtggaactgtgagccagttaaacctcttttctttataaactacccagttctttatagcaatgtgagaacagttccctttaaagtttgtgaatttgaggcttttagcattatctattacacaattaatggcttgttttttttttcctccaaaatgaccaaattaagagtaactctgtagacctttgatgctatccaaaaatctctttagagactcttggttaggaaattgtgcttataatcccttggcttcccttttcttggtaggaagataaactcctgggaaacacacttaggcatgtatttaatgaaataaattactgctaagtgttataaaatgtaatgcctaaaagaattaatgtactcagtcttgacccacctaagttattcacctctagtccctggttgaatattagacatgtaggaaaggctcaattaattctgaatgaatgaaacgactcagattcactcaaggaagcaactttggtgtagttctatgtgttagaaagcctaagttcatgaatgggataaaatgaggtatgacagactgaatacctaaccacctactgtggagctgtgcagagaacgaaggctcctgagcacctgatggacaaaactcatgtcccattccccctccacctaagatgcctttgctctgttgacttggcctatcatttttagtcggccaagggaattgaatcaatgccaacaacttctgccaaaaggcagcagtgaacttcaaaatatttatcaattagtacagggtgcgcctcaaccagtcagaatcggcactggctgtaaacctgcacagctgtactggggcttacctgctgaaaatcagcactgcttgtaagccctgcaatctcaaatcttcctagaggcccatgggtttctaagaagctcctctcattgctatgaaaagatctagcccctatacacatttttttaaccatccattttagaaaaattcctgggaaatttgtcagaatctgtgtaatcatcattaatttagcaattctcaaaggtaacccagagttcatccagctgcagcttattccattgatcacaataatccaccccacccagaactttcctcatgaaaggaatcttcttggagtggccatctggatcgtgttatcctaatcagagtgtagagagcatacaaggtgcagacactctttccactgaagagtcaggctcactcattcttggatgtgcttccccctttcctttcacttccctctttctttcttttatctccactggagaggtattggatgatttactgacattaaaaaataagactataataaattttattttctctgagtaatgcgcacttctgaaaactgccacccccatttctacacattaggcctggagtggaggtgaggggtggcctaaactaaaaacaaaaaccttcccacttgcagataattgtttaatgggcaaaagcttcagctcattcttggattttccatattgcaaaccggtggccccaaatttagtttatagcttttctctatgctttatttccaggcatttgtatgcacagatctatatactttcccatgaccatataaatgaaaagctttcattatcaatatagtacagtgaaaatgaaagcacaaagttacgggcaaacatggactgaccactggggtattaaaacatttctaacaaaatctctaaagccattgaattttgatttttttaatttataacctagataaaggatgaaaactagcatttatcaaatggccaagtcagttaacatattatttttatccacacttctattgtccttccataaaaatgaaataattaaaaggcaataaatgcagatatagtgttccgtatttcaaactagcatccaaagtaattattgagtgtttgatctttgctctgtaccagtatgatgaatcaactaatgaatcaacaaattgcaaaacaggaaatctatatttctgtcagttgaggaacaggtagatagtttatttagaataatagaatattttccaaaatatcaatttagaatccaataggctacaaattaagagaaaaccaaagcagtggcttaaacaagtaaaagattttctgatatatcaaaaaatccagaagctgacaatcaagggttcttgcaggtgtcaagggagccatcatggaaccaggctccctcaattatcttctactgcttttgatctcatggccacaaaatagctacagcaactccagccatcacattctcattctaggcagaaagaatagttttggcaagtgtaaaatgccaaagttttcttctcactatattttaccattcttatttgagaagaattctgcatgtctcattggccaaaaccattttatatggtcaacccctatcagcaagggagaatgaaaattttattttaaattttggtaaagaggagtaaatgaatttggaacagtggttgaaaataaactaactcacaatatttgtcacgtatgcttctgaccaacaaatagacagctctttatggatataatatgtgtttcctcagaccacaaaggttttgaagcaagaatatgagtcacaataagtcaccgtgagtgtttgtttctttgactcttccccttcctcatggtcttccagacctacagaaaccttcatcgtccctcttaaatatttctggaagtccccagaggatgtcttttgcgtactcataaactcagctctgatagatactatatgtgcccatattttctttctgcctgaactggcttcatacagtaatcagagtggaggcatcgatatgtctgaaagccacagttaacactactatattgtttcctgttgctgctgttgtaggtgagatcatcctgttaaaaaaaaaaaaaaaaaaaaaaaaaagccactctctgcaaaagctgtcttgctgcactcaaacccataacctatctaatggaagctagagttactgaagtccatgtggtgaagccatactgtagacgtggtcagtattgcctctcagctttgaattccatgggtcatatcttccacatttggtgctctctgttcctgggagaatttggttggaaaagtccttttcatttctattttgttctactccatagagctcaagcaaaatggcttaatgctggaaaaaggaccccatacgagacgtgccatattcaaatttaccctcccttcagttattgggatattttcatcaggccaatctcataggctttgcattttatttgtggatgactttttaaaaatcttatggagctcttacacaagctttgcatagatacttgacacccactggtttatttaaatcaatggataaattcagtttaggctgccaagctggcattactagaccaaaggtaatattactagaccaaaggtaattcatgctaagttcagtatatctgccttcatcttaaccctatccacagccatcccctcctattcatatttcaggttgtcggaattcaaactggtcttactatccatatgttaggttgtcaaaattcaaactggttttactattcaaattccaggttttacgcacacttgcacttacataccagctctccacttcttatgttaaatcaatctacttatcctcttgagattatgagcctgacatacaggatgttcacttacagagaaaatcatagtttacttttttagacctgtttatgccactctacatggagaagaaaattgatgggctacttagatagaaaaccctcttcaagccagtctagcaaggtctcactaggggatatttcaatgggaaaatatttctttgttactcctcctatgcccaagcccggatttgaagtcccagaaggaatctggattgggatgggaaaaaatctggtagtgttgtggaacccagactaggagttcatatggaagaagaaagaaagcggacgccagagcaccatcgtacctcacgccacccacaggacaccaataaagcaacctgtgacgatcaatgctggaaatgagtgccttggagttagtgttaaatggatgcatgagaatctcaattgaagttaaaaatatatacgatgagcaaactgaatggaagtagaaaaatggcagttatgaacacaacattcaaaagtgccccatctctatgtgtgaatgggattttcagctttcctggaacaagggaagctacttgagaagaatttatgtctagaataagaacaaatgagataatactttttcaaacttaccctaccagtaaatactgctgaacaatctgtctaatttctgtatgcagttacctccagaaacatcagagaacctatgggaactggtatacgatgccaatattgagttttgtgagcacatgggttttgagacaacctcttaaagagccctttcaaaatcaacagagccttgaaatagtaaaagactctgctctagcccttacaatttgagtttagtattggattgttgggatccatttaatactgaggttccaagcctgggttaaaaactttgctaggtcaagagctacacctttgccccttttccacctgaggtaaattatttcctccaagaaattactttcctttttgagcaagtaactttctgaaatgctgagagaaactggtactttaaaatagataatttgcctcagatgggtcacacactttatttccagaagccagtttaattttttttttccttcactctgatgattgggtcaaatccttattaataaaatgtgtgctactggaaaggaaagacacctttgttacttaatccatgtgcggccatttatatttggcatgcataaatgtcatgaagaacagggaaaaaatataattcatgagcaaaatgcattttatgctactgttcccttgccaaattaagtattatagttggaaatttagggtggaggctcactttgggaaaaaagaatcaaattgtctggggattttgctttcatcaccaaagggattttatgtgtttggaaggatcatcaattcctgacttggtggtagacaatactcttacttcacgcaggtcctgcagaattctaatatggcttggttgaaatttcttcttttgactagaaacttttttcacattttttttcagtattccctttgatgcagtcaaaataggtggacaaatacgttgtctacactgaaacaaagcttgcttgaattcacctatatgatgatgtcttcatgagcttgctttgcctttccaaatctatctttaaaagattcactaatctccagattttaaaacatagaggaatgttccaacagtacatttttcaagtgatgtaaaaagttcttggaattaatttgtcatcagccttgctctaaggacggtgttgtttcagccatggccatttaggaactgatcattgctacctacaaccctgttgaaaaggcccacttcgtgcaaaagtcaaaagtaaaaaaaaaaaaaaaactttgtatacatttttttttccactggatgtattacatggttaaatttatttttttaaatttggaaaacaaacttacttttaagcactttcatgtcctaacaagtttaaaacacacatagaagcggaagcattccttcacctgatgtttcagcgttcaaggtactgaaagtcgcttgctcatacaatgatataaagttgatgagtaataaagacacctgattttatttttgctcatgtgtctcatgatgacaaaatttgagacaggtcaacaagaaatatttactagatctagtagttgttactacatttaaattgatagtttctaataatgatgttttgcataggtcataaggaattttctgtgagaaatattaggaataaaaggattttcttcactcttcacatgtgttctacagatgttcacagactagtcttccttttataggctctgaataaagataaaatatggtggaaatcaaccaattcgtcattgctgttttatgctgtagaaattacccttaattttcacttacctttgtgttcaaggtcaaagccacccccatgaaaactcccaaactacacaccaaaaaaacaaatcaaacgaaataaagcattgcaagaatgtgaaatttgtgttgaaaacatctggctgactattctcccaggctatgctcggcactcattattcatataaattgtgagaaaggtttggtgtctgaacgtacctctagcccctatgatgtgcgtatgtgatttttgcccaagtagtcatcaccacaatcctgtataagaaaaataaatttgaatttgctgtgagtcagcttcatcttttaaattaaatatgatgataatacctgctttaattatcttagggcttcttatgaggataagatgaaattttttaaaaagtaaatgtatgaggaaaacttaaaaataccaacactttagcaaatttttatgcttggcatgcaaaatcatatctgatttgcttggcaactgaatgtgatcatgtttttgccatcagaactctcattgtcatgggtaatgtaatccaaatattttagttcccagtgaaagagtcaagaataaataagacaaacactgcatgctaattctggccatggagactgaatataacagagatttgaatgagaaaatctggtttggtgtcaagcataataaaataaagaagagtttgttgatgggcaaaaggaagagatgggttgagaaagtgctgtgctccctgctgagagagtagtttgactttggacaaaataatagcttcagtttctctttggattcattattgctcctggactctctctaatttgaaccttgtaggggtcatctgtgcctctgtcatctcgaatactctccacttcaatgaatcatacttcacactgccaggatgaccacccagaaaggcctgtttatgtaggacttggctgctgcagagttcatcttaagtcccgaacagctgagttgggagctccacaatggtctcctgtttgtttctgggcagggttggagataagatcatctatatagcctaacaaccatctgtgagttaatctgttggaattctcatcttatcactgcatatattggactgtgctgtagtgggcatacattttctaaaatgctgtcttggcctgaaataaagaatatgtcaggaaagtcaatgtcagcctatatacaaacaaggaagttgagattaagaggatacagagataagctatcagccgatttacaccttgtcgcctttcttctattccttcaatatgattttataatcttaccattttaaccactaaaatagtagaaaaccaagatgggcacttttggctaaatcaatagtaactgtgctttgagacttgagcaagattgtggaagattttgcaatggataaaggagattattaaatatcctttcaatgaaatgcaagagcctttggagattatgtggtgctatggggatgtgtgccttcatttttgactaggcttttttacaactctgtagaggtagaagtgaactcatagaaatttgataggaatggaaatagtttttgttgctaaaaatgcaaagtatgtcccttggattataatcgatgatttacctccactaaatctcccaagcttcacaaccaaaaaaccaaaccaaaacaaaagatatcatcataagaacctgaaatttgtgttgaaagcaactgactgatattgcattagatagccaacatgtcttgttataactggtggctctgaaaatttgcattttgaatatatctaataaattaaaactctagcaaggaagttttagaaaatgactacaatatagtaaatgtattcatacgctctgagaaaagtagacaaatgagaaacccatatagctcatgccttttctgggttcagatagagatcagtaaatgtttttcaattataatcatatggtcatttcaaaagcaaatctagaaggattgtttgcaatcaccactgttattcataagtaaaagtttagatggaaaattttgtgtattttgtgtgggggtgtatcctctgaagagtttatgctactcactacaatgtatactttggctcatctgattgttcctggcacaggaatatagatgctatcattgtcttgagacccttaagtttacattcagccagatttctttatctccttccaatatcagcctcaatctaatgatctttctctttataaattttcctcggtgccctcttttcaggctgacttgcctgtccagaaaagagggattttctttaatgtggtaaaatatacataatataaaatttaccattttaattatttttaagtgacattaactacattcaccttgaagtggaaccatcaccatcattcatctccaagtctttgtcatcacaccgaatagagactctgtatccattaaataataactccatattccctccttctccctgactttggtaacccgaattccactttttatctctatgaatttgactcttcttgatacctcaaatgtaaaatcagacaatatttgacctttgtctgtctgcctcatttcacttagcctaatgtcttgaggatgttgtagcatatgtcagaattttatttctttttgtggctgaataatatcctatatacgactttttgtttattcatccattgatgaatatttgggttgtttccaccttttggctgttatgaataatgctgctgtgaacatgggtgtacaaatatctgttcgagtctttgctttcaattctttctggaatatatccagaagtgaatttctggatcatatgatatgttgatgttgaaatttgaaaataaatttttaaggaattctttaaggaaacaccttgattgaaaacaatttggaggaggagcagcctactggggaatgtattatttagtgacattaaaaattatgtaaatgtactgttttcctaatggttgcacttcatccatattatgtcagtgcttagtatgcgttgtttgactctaggccaatccaccactaccttcattaaagcattagagtcaaaaacctttgtctcactggttttcacctctaattaacttcatttctgaaagtgctttgaaataaattttccattctgagggaaagaagccaaaacaaaaaaatccaacaaaacccacgaagtttcccacatgtgaggatttgtttgctgcttttatctatcgcaacattctctctaacaatctcgttcacaattgtggactactcagggttctccacagaaacagaatcaatagggtgtgtatgtgtgtgtggaggcagagagagagagaaagcctgagataaatttatcttaaggattagttcacatatttgtggggcctggcaagtcccatatttgcacgataggacatcaggttggagactcaagggaaagccgatgttgcagttgagtccagaggcagtctacaggcagaaatccctcttcctcagggaggttaagtctttttcttaagaccctcaactaatcggatgaggcccacccatgtaatggaggataatctgctttacttaaagtctgatttaaatgttaatcgcatctaaaattaccttcacagcaacatccacaagtgtttgaccaagtatattggtactatggtgtagccaagtttcgcataaaattaaccatcatgataatgcacttctttaaaaaaaaaaaaaagtggaggagtgttatacaaagcttaaattttgtaacctcatttgatttgggttattattggctaaattctcatttatcttagtcattaagcagatttcagtttactcataaattatttttgtgtgtttccaaatattttttagcacaagttttgccttgacagttggattacattttccttaaagcttgggtcaagatttatttggtaatatcctacctattatcaatgccatctattatagcactcgaggcaagtcagtgttcaccaatcaccaagtaaatactttggcagtatctgaaacttcaatttagagttaatttccttcctgccatcaccagcactgtccgttgtagccatcggttttttatggaatctttattacttacagttatgtccattttgtctgaagtccaaaatgatttaatgggccattgctttaccattttttttttcataatttccctgaactaaagctctgtcctaagcttctttctacctctaagattttgctccaatttctgccatacttggaggaatgccattctcagcctatcccaatcccacccattgtttagatcatagtttaaattccttttcctgcacagatttctcaagcatcctggtctacagtactctatgtttactctattgcctgttttatctgcaactcttcatgttgttaggaaagcatataataccacctcttgttgttcagtaatttaatatgggaatttgacttcccaaaggtaaatgtaaacgtacagacatacactctttgatttgtctcacccttccctcaaaagtaaatcaaaaactctatctaggccgagtacagtggctcacaactgtaatcccagcactttgggaggctgaagttgggggatagcatgagtccagagttcaagaccaacctggacaaaatggtgaaactccgtctctccaaaaaaaaaaaaaaaagtcaggtgtatgtgcacctgtagtcccagctacttgggaggctgaggcaggaggatagtttgagcctgaaagcttgaggatgcagtgagccgagatcatgccaaagcatgccagtcttggcagcacagcgagaccctgtcaaaacaaacaaacaaacaaaacaaaaaactatatagagagataatgagtaaacattttttaaaaaatgaattaatacaaacatactgggatcttgttcagtgtaaggttagtcccatgtgtttctgaactttaccttgggtttgtagtcaatgtatatgtgttaggtaagtgtttttgactttatgtttatgtgtgacttggaaacaatattacctcatttgaattactggcatattaatgatgtcaaaaccttatcttttgagcattttttctacttaaattcagagctgtttcatttgaacactgtgtttaccaagctgaaaagtctcatgttctcttggataatctccagtcagagttatctataaatgatacttcagggactttctttacaaactgaatttggttttctttgtacagtgcaaataagtaaaaccaaaaattaaagtacatgaaaaaacatttgagctagttatttcttcagctagctcacatgcagctgttaaaatctgtatagaccattttctgttcacagtcccattattaatattttgtagagccttcctttagccatttctcattttcaagctggtctcctattactgggagtacattgcagcatttgccattttatttgggattgggacagtaatacagtacttcaacattgctttcatttcccagtatgtcaaacaacatacaaatgtcaagtatttttagtctctgcatcatcatcgttaacaggataccagactcccaatgtgcattccatctccagcgtacaaaatcacagcaagtcatttcaccagggaataaaagagctttctacccaaacgctgttacaattttcacacttcgaacggtatgagtcttaaagcatttgtagtcatagcaactgttttttaaattttgtatataatcattttaattattaagtatttgatataaaatataaggaaaagttaatacatgtatgaaaggtaaataggcaggcttttaaaattaccaaaacccctacattttctaggaaggaatttattattgtttgatgaagttaaaacatgcaagcagttagtgggacagttcccacttagctccactagaggtctcaattgatattttgtgtgtgtgtgtgtgtgtgtgtgtgtgtgtgtatatatttgtgtgtgtgtgtgtatgtgtgtgtctgtgtatatgtttctgtgtatatatacatgcatatgtatatatgtacacccataaatgtgtacgtacatatatacatatgtatatatgtgtgtatatacatacatacacacacaagcatatatatatatatatatacacacacacacacacacacacacacacacacaaatgtattttttcagacaaagctaaaatgctgcactgctattgtggatgatcttatagcagtattgccaaaaggaacaaccaccataggaataacaataccttttaaaattcattataaataaaaacaaactctagtacctttctttttccaaggtttaaaactttattgtacatttccctttaaaacaaggaccatcatttaaaaacatcttttaaaaactcccaatactttttatacacacaagcaaatataaataaccatgtttctttatattaaaaaaaatgggaaatttatttggggtcatttcttgtgaactttttttaaaccacctataagcttgctctttattatgaccataattttatatatgtgtaataaaataacataataaaaattatatggtcataattgttatttttagaagctctgactttccatcattaaacttattaatcaaaagtgtatgctacttattttctaatttattctgaaatgtgaaccaaggaaatggagaacatgaaatttttgcttcaagaacttagacagtataagtagtgtttagaaccttggtcatctaggagagccatcaccccatcaaaaaactctcattaattataataaaaataaaattcatccaaaaacattttcatgaagttaggaattagttacatttaatagaaatatatatatgaatatatatatttttatatagtttctatttttaacataaaatagaaaatatataataaaattatattttaataattttattatttaatgttataataaaaatataattatatactaaataattataaaatttaatacgttatataattaatataattatgttataataatatagtaatacaaaattatgtaattttgttttataatatataattatgtaatatattctatattatataattatgttaaaattaaattatataaaaatttattctattgtgtattactatatatactcgctataatatataaatatttttaatatatagtaatatatataaatatatttttatatagtatattataaataacatatatgtatatataaatatattgttatatattataaatgatatatcatatacttatatataagtgtgtataagtatatataattatatataaaatactgtatattattgtatatattatgtaatacatattatatgtattgtatataaaatagagaaaatatatacattgtaaatagttatatatttatataaaatagatatttatgtctattatatatactattttacatgtaaaatatatatttatctattttttcctcttaattcagtactttaggaaaacaggtttttttactttatgatggaatgcaccactcacattacttgttgcttgttacttttggaatactgtccaggccataattcaccctagcttgcctaagcttttgttggggctgataaacttgtcagcttctagaagcttctgaaggccagttgaactcagatccattctttttaccaaaataccttctaaggtaactgagttgtgtgtccctaaatcagggcagggttgagagcattgaatcagctagaaaatgactatagtcagccatgtgctccaggtattaatatctcagtaatatgtttatttaccccgtgtgccggaagttttatatataatatctcactcagtttagagtaatcttttaaggtagctcctcatttttataaaagatgaatcagaaatgcaaaaaggtaatttaccagttcccagagaaatttgtaagtacagacatgtcaacctcagtagcagcaagggcataaattcccctctacagctacttgagccatggtaactagtaaatgtttaagccatggttgttctttgcagaaagcccagatgtttgtcaatgagtaaaacttttattgagtttctactatgtctagactacaattctaggaactcgacaggagggagagctataaaagaaaaagatgtggcgttattattaagaaacataaaacccacttacagagacacagcacaagagtataaaatccgggtgaacacttttacagggaatgtgtgtctcctggaggccttagcacatgaaaatgatagagttcaaagtgaaagccttcaagtgattctgtgctaaataaaggcaatttaaaccaaatatatttctttttttagtaaacaattaaaatgacagtataatgggtttaaattgaaaaaaaaataatgttttaaaggaaattgccttggctatcacggtgtgatatctgccttcgtgcacatctctgtgacttaaagtccaataccaggatataatgaattacacatggcttttggctttccaaggtattatccagtgagaagagatatgagaaaaggaaaaggatcttcgaccgtaaaattaaaataactcaattatcttaccttgttgaagaaataacagacctagaaatattaaatgacttgctcaaggtcatatacttagtttataaaagatcccggacttcaaacttaaaagactgtaagcagaaaggattgaagaaatgtttgcccattcatttttaatgtgctaaagtgtagccatgaaagcatagcaagggcttcatgctgggaaactgaaatggcagacaaagcaaactaaacaaagacccattgtctcattatgaactaagattttgaggagattgtgggtttactatgaagagcttaaggagcactagttggggaggggagaagtatgactttatgcatagatttaagggactctgggctctttgtggttttaatcagacatacgatagttatcataaactataattattataagttacacccgtgtcctcctagcacagatatagtgatatgcatgtatattatgcattttctctgcactctctctgcctgtatagttatattcatttggtagaaccaaaaatgcatcttatggcaaattttgatttcaagttgaaatacaccagtccgtatggagagtgttgtccagaaatgcagatggttctttgaagaaaagtacaatcaaacatggcagagacagtcttacataacaaataacagggctgatgtcaaagttatttgccaacagaatacagtatgtacaccattaagtactttgctgtcttcatatgaatttgtccttagaaaaactgccccaatctaaactgttacattaatatctactaccatattaggattaggagtgcttactatgtgtcaggtactagtttaaacactttgcaggtattatgagtgggataattataccaactgaatgaagtacattactattttcatcattcccattttatagatggaaaatcaaggtaaggcaaattaagagtaaggcaagtaaatggaggagctaggattcgaatccaagcagcctgattcaaattttgcatgttcagttgctatgtcaacaacatctcaatatgactgaatctttttcaagagagaaaccaaaacccaaatgcaaaagcactctgtcccttttaaggttgtcatttgggaagtacatacaactttcctaagaatgctgtcataccttaaatatttctgaaatggataccttggaattaacgtcagagcctgcagctcattctttgactatctcctgtggtggcaaatctctttttgaaggaggattttgttttggatgcaaccaaagtcccttgcagccaaataccatgactaaggtgggtctctaatctgggtgatgccatttttggtcaaaaaagtgaaacatgcctgggcggcaatggggcagattgtttctctaaattggctctgaggacagttccaaggaggagcttcagagcctctggagcaattgcctgctctgggttcatgacttgtagtccaaagtgatttgacttggggtgagggtgtggtcaatttagatattcaaatctggacaagtttatcatcacttgcctctgtaacttggatttaatttttaaaaattcataaatccaaatagtcaataatttctgtagacaatcttttggaaaattaagttgacctatctcattgagtgaacagggatgaagctagcaaaacagaaggcatccatctgtgtctttattttttgctccatgccggaagggtttcctgtccacccagcatacctggtggtattacctacacacgccactcatctgtatgagtggctgagcaagaacggatcacatggatcagacatttttgtctctgttatttcttctccaatatctggaacacatctcccgcctgttttcattcctttcaactcaaagtatcatgttatgtctctactccttccttgaccccttgacctgaagtgatcccttgcttctgtattcctgagctcatgttattgatgcaattcactggactcactttcttgtattgttattttttcttttgtatacattttatttctccagctatactataagactaaaggcaagaatgatttttttttctacccattttatcttcctttctttccatcctctttcctttctctcttccttcctttctgcatccttcctttctctcctttattttctctcctttttttttcttgtgggctcttattcaggccctaggacagttccctatacaaactagtagcccagcgatatttactgattcttactcattcttgttatatcaatggaatgaataatctaattgcccactctgcatatttatctttcttattataattttcttgagaaaatgttaagttgttttccttcctttgtttcttcctttctttttttcttgacatatactacttgaagggttatatttcaaaaaaaggcagccttagttaaacatctttttttatttgttcaaagtgataaagggcaagtatactactaaaactgattctatcttctttgcaagggatgtttttcttaaagatatgctattaaagtataattgactcctcttgctacataaaacctttggggtctacaatttgattcttcagaagtctttgtcaaaatattgcttaaaagtaagcatttgttttaccagtattcattcttatattttgggggttcaaaatataaataagtataatatccagcaatctaaagcaactttacttttattgatgctctataatcaacaaacattcacatttattcacattttaaattgtacctttttgtgtgtggctattgataaagtcaagtctgataaaataactaattatatggtcccacagtttgtggataggaaaattgctcagaaaagtgttcagttctctaattttggactgttaataatgccttctttttcacttgtaaaatgatgctctttcctttctcccagtcatgctaagaactgaattttactgcttcaaccatgcctgcaatatctaggagagtcccaagtgaggtttcttagaaatgtttacaaatgcagaggatcaaaagcttttctaagtatttagttttgtttacattttaatcttttaaatggctcacatgcatatggatgttaaagaaaaaaaaatacagtgctatgatgaccttaggtagataacccaagtcctttgttttaagaaaagaaaaaggagactagagagcaaagataaacaggatattctgcattttttttagcaatcttgtactgttgtatattacatttgaaggccaaatttaaaagttatgctgaaggtctatatgagaatattctgttatcactactgtcaaaggaagtcatcaggacattttaattagaaaaccacaaggtttaactaatatctaacttctaaaagaaattgaccttgtattatagagcatattccagagtatgctgcagtttgataactagatatcatcatctctgtgggtctttaatagcaaaggatcctgtccataggcttgggctagcctttgagaatatgtatccttattgtttcaaatgaaggtctccagccaacttccatttatttggaattagtttatcaaaccaaaagatgatgtacacccctgcttttcttttctttcccctgaagtatcctttgaaatgaagttagtttttattattacctctggcatactctgggaagagaagagatatagccaaacctgttgattctactcctgttaataagtttggtgaaaacactgaaggtgaaaggctctggaacatgcagaactgaataaaccaacttgaaattaatgaaaagccagagcaatattgtaatgccagcaccgccagaagtcggtcagtatttgtgttctttatttggtgcatttctctgcttttatgaaagatacagcaggggtctgataaattcttagcccactttaaagaaaaaaatgaaactgtgcacataactgatctgatacatatggtgaagagcttcagatggaaaccaaatatcttggagatttaactatttacttaatctttcagctgagctccctcatctacaaattcaaggttgccaaatgatatggtctgcctgtgtccccacccaaatctcatcttgaattactacaattcaagataatcgccatgtgttgtgggagggccctagtgggaagtgattggatcatagaggaggtttcctccatgctgttctcatgatagtgagtgagttctcatgagatctgatggttttataagtgtctggcatttccctgctggcactcattctttctcctgccgctctgtgaagaggtgccttccaccatgattataagtttcttgaggcctccccagccatgcagaactgtgagtcaattaaacctctcttctttataaattacccagtcttgggtatttttttcatagcagcatgagaatgaactaatataccaaatatgacctcttcctgctttatcaatggactctacttccttcaagtttgagagccaagaatctctctgatggtcttcatattaattcccttctcttcactcagcatttctttcctcaaaaaaaattcccttgatatgtgcttcaggtagtcataatacatttatcttttgtccttaagattaaatcctgagtacctgcaagcaaaaagtggtttttcgttttcattctctacgtaattttcttcctgttggtagaaaattggagttctaggagactttaatataaaatattgaatttttttgtatcctatgataatgtttaaatcttgcctctgtaggaaaagtgataaattcacaacctattacaatagagaatccacttaattgccctatattttacattgctgcggagcataaatatttcttccttccttccttctttccttcctgattcttactttaattaccacataatgatttcctcctgcactctgtactgaaccctgtttagagagtgtttctgtatttttaagtgtgagtactttaaatacatttatactcctcaaaaaagcaagagtagaaaagaacactaatatatgtcatattttaaattgcttcaaataccgatattgatttgtaaattagacaaaagaaacataacttctcagtttatttttaaccttttattgtagaaaaaagtctaattatacaaaagtagagaacgaagtatgcatctctatcactcagctttaacaattattatcattttgttcatctagtttcatctatcttcacattttctatttttgcttgaaatttttaaagaaaattctagactttgtattatgttacttcagtatctagctttagtttttgaaacaagatacaatttagaaatatctaccctagttatgagaggataggatctttccatggatgtgtttttgttcaaggtaataaacaccactgcatcaataggccagtgtaccattttaatatgttatatgatgtcagtacttattggatattcttttcttctactgctaagggaaaaactttctctgccccactgacagtttctgtattagtccatcttcacattgctatcaagaactacctgagactgggtaatttatgaagaaaagcggtttaatcgactcacaattccacaggctgtataggaagcaccgttagggaagtctcaagaatcctggtggaacgtggagggaaagttggcctgtcctatatggctggagcaggcggaagagagagcgaaaggagaggtgctacacacttttaaacaacctgatatcgcagaactcttatcatgagacagcactagagcagtggtgttaaaccattagaaaccacccccatcggccgggcgtggtggctcacgcctgtaatcccagcactttgggaggccgaggcgggcggatcacgaggtcaggagaccaagaccatcctggctaacacagtgaaaccccgtctctactaagaatacaaaaaaattagcccgatatggtgacgagcacctatagtcccagctacccagctactcgggaggctgaggcaggagaatggcgtgaacccgggaggcggagcttgcagtgagctgagatcgcgccactgcactccagcctgggagacagagtgagactccgtctgaaaaaaaaaaaaaaaaaaaaagaaaagaaaaagaaacgacccccattatccaatcacctcccaccaggccccacctccaacactggaggattacaattcaacaagatagttgggtgggaacacagagccaaaccataccagtttccataagaaaaatgaagagagttgaaaaggataattgaagagattttgaaagttatttctacagaacttctgtcataaagaggactatcatcatctcatcttggctctactctttatatgtatgcctacaattaaaatcgtagtttattctttcacccttagcttttggtggattcttttgttccacagataatcttgaatacataggactattgttgtggggcttgagcccagccttttcctcaattctcacgtttggctactgttgcaccctacattgcttcagaacgaaaggagttaatgtgaaaggacttaatatcataatgtgacacacaaagggatactcagtttatgtggatttgatgcctactagggatctatgagtttgattctcccagatctcccctagttgtagggtatactttaaaaaaaattaaactgttactaacactaaattcttagagttttcccattcattcatcttcttcactagtgaacaggggcagagagatggaaaaatgtaaaattgtgggaaacccaaacaggtttgaatttgaaattaaatttttgtacttttagttatatatagtatgcatctctttgtaaaataatttatatactgaagtcaagatatgaaatctcttagtaatcaactgaccaattcatctgtcttgaaatctaccttcaagcttggaaaagccatcgtcatctaaataccaatataactaactttcttttattatatcgtactacaaaaatgcttcagtttttgaaagctacctgttttgggaacaatttaaataacaacagaaactatttacagtgtctttaaaccactggtgagaaagtcttcacacttaaggaaaaccacactaattagggttttcccaccttttaaaaaaccacattttttgatgattagaaaaatgatatagcgtggtttttttgaagaaaacatggaaaattcatgaaggtacaaagaagaaaacaaaaatagctagttaggttacttttgtatatatgttttgttgtgcgtgtgtgtgcacacaacttggcagcacaacacggcttaatacctaagagtatagaaggcgtatgctcttgaggttgggttcttgtcttggtccatttactgttgctataacagaatatgtgagcctgggcagcttataaagaaaagtttatttggcttgcggttctgcaggctgtacaagaagcagggcactggcgttcgcttggcttctggtgagggctttcatgctgcgtcaaaatatggaagagaaggtctaagcggaagtgggcaagtgtgaaaggaaaccaaagccaggggatgagggatgtctgtccgagctttacagcaacccactctggagggaactaatccattcccaagagaacaaatgccattgctacagagtgagaactcattcagtatggttagatggcatccagacattcagagggttctggctccctgatccaaacaccccccactgggccctacctcccaccacagccatgctgggggattaaattttaacatgagatttggtgtggacaaacaaaccatatccaaacctcagcggcaaatgacccatgctctacctcttgctaactgccctacctaaaccaagcagttcaacctccctttgcctctttccttatctataagatagaaattataataatgaagcttttttaggattaagtgagttgatttatataaaacacattgtaaatttcaaagaatgttgattatcagctgggcatggtgactcacacgtgtaatcccagcactctgggaggccgaggctggtagatcacttgaggtcaggattcaagaccagactggccaacatggtgaaaccccatctctactaaaaatagaaaaatgagctgggcatggtggtgcatgcttgtaagcccagctactcccaggagagtcactggaaccctggaggcagaggttgcagtgagccgagatcgtatcactgcactccagcctgggtgacacagtgagactccatctcaattaaaaaaaaaaaaaagaatgttgattaccatcattactatctgagattcaacttttcttatgtcaataaatacagtatacctctttgctggctacattcagagttatgtaacattcatatataaatctttgtgaaaccttcagattatttagcatagattcctaggagtagaaatatctatatccaataatttgagttttttgagggttacttattaaataaaagtcatatctcacaggcatagttttaggagtttggggaatggtgagcaaaacagacccagagctagaagaggatatggtttctatgaaaagtgacaatggagaatgtacagagtactttgagagtgcaatctagcctgggggggatttaagataaagtgacattgactttaagatctaaagaatgattagggattaattaaatggccatttggaagcaggaggtgaaatcaatggccagcaagaaagtcttgaaacaagtttgggagaaacctcaaaggaagccagaagggaggaagagagcttctggatgaagaggaacagttgggcaagatcctacaagtctggtaatctgtctgcagattttggctttatcctctacatagtcagagaagggtttgaacaaaagaatgacatccattcttagggtgatgcttacactaaaagcccagacttcaccactatgcaatatatccatgaagcaaaactgcactagtaccccttatatttatattttttaaaaaaatgacattcgtttgtattaccaaaaatgaaacaaagaacactctggttgtatgtattggaaggagcactgtaaaggaatgtggccttccccttaagaggcctagtggtgggagagatggcagctgggactagggtgatggtgatgaggaggcagaggcatggagatggtgaaaagactttgatgcagtagcagaacctgcctatgggccacatgtagaataggagtggggagaagtaacttctagctctctgcttctgcagcatactgagaagagaagtgtagaggaagcagatctgttaagctggaactacaggttgaatttaactttaaatgtatgaactttgaggttgaaaattatgattgcaacttcaagaaagagtgttgtgatttacatctgcaccagcaggatttgagggggctttcacacaatcataccaatttttgatattattgtaatttttactaacattatttttaaactttgcctatttggaacctgaattttaatcttgtttaaaaacatgcactctgatttctagtagtctgagcatttttttctgaactttaggtacatgtagatttttttcaattgtctgttcaggtcctttgacaatgtcttgagtacttatttttatctatttgtatgaattttttctacataacagatcacaaccccataccttttgtatttaatgaaatacttttttcttattttttaaagaattctcttgaaacatggaggtatagagcttttaagccaatcaaatcattccatgtatctgtgtgtgtgtgtattgtgtatatatgtgtgtgtttgtgtcttggttgtgtaatcacattcattgtttctgtgttcacatatactctcccatccagggagcagacaaatatatccttatatttactaatacttcttaaggtttttgtgatggtggactttctgtgtcaacttgactgggccctggagtatctggatatttggttaaacatttttctggctgtttctgtcagggtgcatttgcatgagaataacttttgaattggtagactgagtaaagcgggttggcttccccagtatggatgggtctcatctgatttgttgaggatctgaatagaacacaaaaactgagtaagggagaattttctctctctgcccaattgcctttgagctgggacatggatcttcttccagtatcagacctagacagaaccataccatcagctcttcttctttttgttttttaagagattgcttcttgtgaataccattcacagatgccaaccatcagatatagatgtttgattagcctagtcttctgggactccagctcactgactacagttcttgtaatttctcagcctccttaatcgtgtgattaaggatggatagatagagagatctagatagatctagatagatagatagatagatagatagagatttactacaagatttatttattgtaagacagatatattcccacccaaacagaaacaaacaaacaaaaaacccagaagaactatacaaatctttggagtcatctagcatagtttttttcttttcctttcatatcacattcatctgcaagtctcattgtcttgagctgtagaatttgacctcttttataacttctacagctatatagatagagagacatagataaatctatatagttaggtagatagatagatatctatataaattgatagttatagagatagatatcgtattggttctgtttctttggagaaccttgactactacagttttcatttaaatgctttaactatgtatctagaatttaagctgatgaatagtccaaaagaagcctcagaatttacttatttttcccaaatatttttcagggctatgttttgaatggtccttttctgctcacagatttatgtttctaactattatctagtaataatttgtggttaaagttactaagatttgtttctgggctatttttttcatccaacgttatgtttatcaataattctacaactaccattttgttttctaattgcaagtttagggtgaatttacaaatcaagtcaaacaagtctcttgtattataccatgtttttcagttatgtttctctctgtttttcattatcaaatttatttcttcagatgaacttcagaatcatgttatcaagttccaaaaatttgagtcattagccaacacttgaaatttcattaaatctactcattattttaggacaaaataaacaggttatgatttggagtcaatctcaaagaaatttgtacgtcttttgctttatttgagtcttcgttttatgtttttgtaaagattggctttttttttcttacatatttgatctgtccttagctagagagagatgttaaaaataaatagaacagtgctttcctattgattatcctttgtaattttttttaaaagttttaaatttatagatagttgttttattatccaggacacatattttattgtgacttgtacttttaattcacaaaactattattctttattttattttttgtgtttccatcttaaaaataatttggctgaaatcaattctgttcctattttctctgtgtttgcctaataaatctttgcacttctttgacaaaaatgtcattttgatttagatagtttccttttacttatcatgtccttggattttatttttaagcacatcctgaagatatttgtcttttaatagaagagtttaaacaatgtgtttccataataatgtaattggaactccgtcatcttattttgtgtttttactttgctttccattctttactttatgggtttcatgtgagttctctttccatgaaaagacttttgtgtgtgtttgttttcaagaaatatcattcatctatagttatctaattaccaaactcaagaataaaattatattctttgttaactcccaatataatttgagcaaattcttttataattttgtaaatatgacatatggttttgtactggaattatttttattaaaatatctcacattatatatcctcttttttaacaactatctttacatttccagatcattttgaaaccatattctctgcagtttatattttgctataggtgtaactggtttcaataatactagaaatcttgtattttaatttctgttgatctctaggtagaacacagcacacatataagttgcacaaaatatctccccacccaaaacaaaaacaaaaacaaaaaaacagaagaacaatacagatctctggagtcatccatgatggttttttcttttcccttcacatctacaaatctgcacatctcattgtcttgagctgtagaagttgacctcttttatttcttctatagctatcaccctagctcagcccaccattgctgtttattgcaattatggcaatggtcttctattgggtcctcttctacaatggcttccaattaaaatgttaggtaagcatgtctctcctgtgctcagttcctttcgctccccatcttactctgagcaaaatgcaaacatactgcctactttagtggaacatgctctctgccctccaccaacctcctatcctcattgctccagccacattggcctcttgctgtcctctccattgctccagccacattggcttcttgctgtcctctccaagaagtgaagcatacttccacctgtagtggccacccctctattataatatccctctgagagctatccccttccatctctctggtttccacccacatatctccttatttaagaaaactttctgtattattcttcataaagtttcactcctcacctccttcacaccccaataagtaattgttttgtacttctcttaagagcagcagaacataagacaatagtaatcctaaataaaaagaaactaccctagctaacaaaacatgctaaatttcaaaaaaaaaaaactgtacttttagaaacctacccttacataaaggcaatatggctgctagaaggggctgtaaagaaaaattcaggtttctgaattatggagacaagaacacattgaacaaaggccatataaagaatttccaagactgtttgtgaccagatggagacaagtggggtgagtgggcattgcgtatggttctgaattcctctgtgacttgctgtgttcatgagttactatattttatgttctgctgttcctatgagaaagcataatttactttgttgagaaaacacgtagatgaaccaaaacatcttccatctttaatgacatcactcactttctgccaatgtcatatgagttcacccatgtcacagaaatatgtgcatggcagaacagactacatttccctactatgatatctttgcttaatttccttgatagtcccagcacacgcaatcttaatattaataagtatttttttcttttgggaaatcaatgaggttagaaaattatggctgctgtatattgttcctctttcgttaatatctgtagtggactcttctagaagacaaatgaaacaaagagctgggaactatttttgccaatcgtagatgaaatctctgatccgaaaattgtgcttggatttttttttctttttttctaagatggtgaactggatgcattgttagcatgcctctcccacttgaaaagacaaaatactgtgtagaaattcatgctgtgaacgtttttccaagaaacagcataggaaattaatcaaaaaactgaaagaaaccacagacctatttcaaagaagtggtgagcagcagcttacgccgtgaaccacacaaaaacctgtgagtgtccagagcgtgagagggagagactgcatttatgacacacactctcactgaggagccaggcaatccaggccacgctgggaggccttcactctatccagcgctggagctgacttactgctgtggggagcatatgaggaatggcgtgcggatctgctttgtgttcactcgcagaatccagtggtgatggaaggaaatcatgcctgatcctacctcacggaggacctcgcagaagtctgccagctaattgagttaatggtcatgggatgagagatgctcccaacagatgtgcggtataattttgagtgggaatgaaccccattggccagaattgagagtcaagtgggaactgtgctatagccacaggcacagaagctggatgcccacgctttgctggaggaccagaagaggtgtggcctgaaagccgcagtttctctctcagcccagaatgcttctggcctggggcagtttggaattctgagtgcaggctgtctggaacccagctagctgctgctagtagaacactgtggatgcgagacctgccttgccaagtgtgtgggggctgagtggggcttactgccacctgctacccccgactccccatgtggattcatttgtacagcagaggcagctatactcctccctgtaacattaccccagcaggcagggagttgccctctgatcaccactggggctgctgcttgtactcacaagtggggagccaaacagcaaacttgcctgacccagtccccacctggctttgccccttcatctgccctggtagtgtgatacaatggacagagactcctgggagctccatggccctgcacattgcctgaaataccagagtacgccactcccttccccccgactcccctacccatggtaacataaggcaagcacgaatcccaaaactaccaacacagttggcattcttttgcaagtgccacctcctggctggaggccaagtggcacagcccattacaacatctgcaggtacaataacacagtgcccaggaaggagaaaacttgcacaacctcaactatcaccattgcctacatcaccctggctagccagtagatcttgagtctgtccatgtgcccagtacatgaccaccacagccgtatttgagaaggccaacacactaaggctatttataaccacggaaatctcacagggtctacgtcactcccttcccacccacaactgagctggtactgatatccactgctgggggaccagacagatcacatcactggatcccttgcaaacattcaccagcaccagcatggagtatggaaacctcactggggatgagacccagaggagcagcagtattcacggtagtctggccctcagggaccgctactcttaggggtgtgggagtgcatcacattaaaggagcatcgtatgggacaaaggaaaccagactgcaggccttgagtccctgatctttccactgtggaaagtttctttcagcagaggcacagctcatcatttatacctgtaacaggagagagcacaaaatctctccttctttcaagcaagcggttaatcaatcttctaaaaccaggatgtgtgttttgagctaatctctgccagcagagtatcttaaactactcagcctactgatgaaaaaaaaatttcaccagcagagggctgaaaaacaatgtggcaacaccagaaagttgtctgacattgccttgatctgagaggatgataggaaattttttggctgatttgatctcttagtgtcctgaagtttagtgtcattacttacatcaaatcaatctaagctattaaaaagaaaagaattctggtgaatgaggcaagatctaaaagtgactttttaatcttatgagctatcattttagatttatatatctcattttctcaaatggcatgtatagttaatgagggtcagggcatttctcatgtatatcctccatgtcacttactgtggggatttgtactgcactaatgtagacaaataatttattgtgagaggttgttgttgcaagtggcaagttaggccactgaattgaatgattaaattctgcgtttaaatgagttctggaggagcaagactagttcccacaatgtgagaagatgactttaactttcagtcctttagtctagtaggtaggaaaaaaaaataaccagaaattaatttgattctctgcacctgtacacctgactgctgagaatgatatgttcaattgctcaggggaagaacactttgaataactgagagtaagttagaaattatcacctatacataaaaactagcatgctatattgtaatacctgtgatatggtttggctgtgtccccaccaaatctcatcttgaattgtagttcccataattcctgtgtgttgtgggatgcagtgggaggtaaatgcatcatgggggcgggtcttttctgtgctgttgttgtgatagtggataagtctcatcagatctgatggctttataaagaggagttcccctgcacaggctctctctctttgccagccgcatccacgcaagacatgacttgctccatcttgccttccgccatgactgtgaggcctccctagccatgtggaactgtgagtccactaaacctcttttttttcccagtcttgggtgtgtctttatcaaactgcaacagaagagggcacaaactcctcctttcaaggaaaagaagaaaaacgtagagttcaaaatgtctgtggttaaccacataatctgagtcttctagtaaatactatttcctgggagaagtgtagttactttggaaggaatctgaacttttagttattgatatgccacttagtatttaaaagacagtgatttacaaaaagactatgcagaaaggcctgggctttccaagttttctccaaaacccctcaggtattcctgatgagcaagtgaagcatttagagggtttaactcaccatgtatgtctaacgttactacatgtaatttatgagtcattgttttctactcaatagctaaatactttcacgtatttttacttatgggatataattgaggaagagatacaaattcaaaaagcatccagaactgaaagctctttccatttaatttatggtatataccagggttggcaaactgaatctgcagaacaaatctgacccattatttgtttttgcaagtagtttttttagaacacagccatgtccattcacttactcattctttatggctagttttgtgctacaacagcacagttgagcagttgtgacatagatggtattgacaggatagttattgacaggattgacaaagttgcaaatatttaccatttggctttttacaaaagaagtttgccaaccactgatgtatattattagatacattagtaacaaatgacatcataaatttctttctttttagcaatcatgtataccaaggatataagaaatacatctcattagaaaaaaatcttctattcagccgtcttgcttcaccttcctctagaacaaaatcttattgccaaataatttaagaaaataattcggtcttcagattcaatatttgtgcctcaggtttccttcctaggaatgaattcccacttcaaaaaacagacacacacattccaaaagtgttcttttatttctagtaacatatattgtataaatactctattttatatgcacttccacaaaagcgatataatttaaaagtttttttcattagaaataaatgtataaaaataaatatgttattataggcatttattactaactatagtccttcttggaaggaacacccaaaccaatacttataaagtacatgtaatttatagtaacatattttactatatacatatggaaaaaatcatattctcacagaagagctgaacagacattcaccaggatacgactgttggaccagctgctggagatggacctgctacccctcagcagcctccccaccacaagacaagtgatctcaatgtccccaaacctgtgggaccctgttctacacacctcatttttgttccggcgtttcatcctccttgtgtgattgtactgattttcatgagacacaagttacttctttacatccatattcccaaagcagggttacatggtaggaaagaaaggaagttggaggtactaagctcattgtgtctcctctagcttttaccagcatctaatgcttcactgctttttttccattgtagactttaatgcacttgaataaatacatggagttgttttttcctcaaaatgaattacacaaataaagactgagatggtccaaaaaaggaaagaggaagccatttgcgttatttcacgttgctgagcctttctctcatgttgaacaatctgaagttttaattctcggtagaaataatgtataaacattctctgaaaccatagcagccataaacagtgctggtcaaagatcctatttgtactcctttctccccccattgttagtgaggtaaagtaaaacaggtcttagtaaaatctcacttttctcctacttttcatttcccaacccccatgatactaagtatttgataagtaccaggaaacaggggttgtaatagttctaactttttttgacaattgctttgttttttctaaacttgtaatagatgtaacaaaagaaataataataataatgcccggggctttattatgctatatcactgctcagaggttaataatcctcactaactatcctatcaaatttgcaactggcagtttactctgatgattcaactccttttctatctacccccataatcccaccttactgatacacctcactggttactggcaagatacgctggatccctccagccttcttgctttccctgcaccagcccttcctcactttgccttgccctcaaagctaacaccacttaaaccacttaactgcattctgccattgtgcaaaagtctatgaaatgtttaggtttctttaaaggatcacagctctcatgagataacacccctccatcatgggacagacacttcaagcttctttttttgtaacccttcccacaggtcttagaacatgatgaccactcccccagctgccactgggggcagggatggtctgcacaaggtctggtgctggctggcttcacttcctttgcacactcggaagcaggctgtccattaatgtctcggcattctaccagtcttctctgccaacccaattcacatgacttagaacattcgccccactcttcaatgacccatgctgaaaaagtggggatagcattgaaagattccttcttcttctttacgaagtaggtgtatttaattttaggtcgaagggcattgcccacagtaagaacctggatggtcaagggctctttgagagggctaaagctgcgaattctttccaatgccgcagaggagccgctgtacctcaagacaacacctttgtacataatgtcttgctctaaggtggacaaagtgtagtcaccattaagaatatatgtgccatcagcagctttgatggcaagaaagctgccattgttcctggatcccctctggttccgctgtttcacttcgatgttggtggctccagttggaattgtgatgatatcatgatatccaggtctgcaggtgacaaaaacaggcataaatctctgattcattggctaattagattatttagcttaaaaacacattaatcttttatgagacatatttttttcccagacctgttgaaaggcccatttaaattataaggtctgcaaataggtgttttaaaacttactttgcactagtaactgatcctgatatttttttacaagtagatccatttcccccgcaaacaccacatttatcaaacttctttttggagtctatgatgcgatcacaaccagcttttacacactgtccttgcacacagacagaggtggaatctgggctacatggagtaccatctacaacctgaaaaaaggacacatgtctagtgttacatacaagcaaaggaaggagatgctgcaatgataagtgtaaacattttctctctactttcctgaccatgctaattaaacacagtaccctctacacattatgcatttcatgcatttacccttcactttggcatatttttcagtactacgtatagacatctgaagaaattagatatttttaaaaattatttatctattgacctatgtctcctccagctaaggtcaatgaaagtagagctgtttgtcactttgtttactgctgtatcttcagagcctagaataattagtatctggcaagagtaagtgcttcagaaatcacttgctgaatattgaatctgcaacttgggaatattttcatagcctatggtgctaatgacacacgatcatctcaatcacattaaattccattttctgtctcagatccagatgtattcccttagcaaaacagcaaaagaaatgatgcttttcctagttcaatatgtgttttcaaacataaaaataatcaatactcagactaccacttctattattctgtttgcacctgctactgctagttacccagtaacaagtattttggaccatgcatagactattttccaaaactactggttactgtgtgaatataaaatgtatctaactatgagctgtatgtgaagcctagtcgcacagaggagcgcttgactgtccaaaaagcttttctttgcatataaaagagtaatagcgagcaattgcaagcatgtgaagtgttagatttaagcttcattcataactgaaaacactaaactcaaagcaggcagttgccaattaatgtaaaagaaaaggagttcaaatttgaaattgaagatatgttaatatggaaagcaaagaaagtataacaaaaattgtttgaaaaggtagcaagcccaggccttgatttttaggtaaaaataaggtaaaaacgaactaccttgggctgcaaaacgaagaagtagccaatgcctttggcttggcagatgagcttgcacctgtcctttggtgagacgccagcgtacttgggaatccattccaccgcaggcccactcccaaaggaagcttttgaaaactcgttgtgtgcttcacattgttcctctctaaaggtttttcctggaaagagaataatatgataacattatcagtttccaatcttgagccacctgtttgtgggtacatctttttttaatccagtttcttaaaaccagagtccgttgctcctcaccattattgtctggacagtcctcaaggttacaggatctgtagcgcactcgtttgccttcacagtacttccctccattctttgggactgggttgtcacattccctcatcgtgtactggactcctccaccgcacgttctcgaacagtctccccaaggcccccacattccccagcttccatgaaaaggcgtctaaatggagacataaatcatcagcattagaattatctaaagagaacttttagggtatcaaagaaagccacatgggacaaagaatcagttctaaaaataagctatctcgcattcctgctagaggacacggatggggatgtttaacttggtatcatatcttttaccatcactttgttcttttcaattctgaatgtgtttcagtagaaaaactcacatcaaaatgctttctgtcggttttgttcacacacttgccgttgatacaccatttcccttctccacagctggtgccatccgcccacgggaagtgtttggtttgacacaccagcaccccaccagaggtgccggtacaccacaaggtgctacatgtgctggctgcatcggggcagtgtttggagtcctccccaaatgtaaactggcactgccggttggcatcgtacgaggtgccagggagatcgcctgggagctgtatgggattctgaggcttgtccatcaaacattcccctgcaaaggaaatgccaaccaatatcaatacagagttagtgagggcatgaaggggtagatcccatttcagaaaatatttatcatatgagaaaatagacagcaaagtgatctgaaaactgtaaagctgggggagggaaatgctgaagagatttagattactattaagatcttatcctcaatggggtatttctatattaacaatgacaggaagttattgatctgcgaacaatgtgaatgaatgggctttgggagctactcaaccggaagcactattttttatttggaattaagatctcaacagttaggatcttgacagaggaaaagtaattttgaagtggggaaaataaaaagaacaaaaaggaaagagttcatttaactaaactttatgcgtgaaaggttggatgccatctagagagagtagctggaatatctcaccatgaccattatccagaaatgatgtaatcatgtaggcactgcaaggagaccaaggctggctgtggtccaggttggaaagcattgacgccatcatgtgggaatcctggttcacaccattaaggctggcacactgctttgcatcatcatgtggcatgttaaacacgtggcctaggaagcaatccagaacccacattaaagtatggatcatggctgggtgcggtggctcacacctgtaattccagaagccgaggcgggtggatcacttgaggtcaggagttcaagaccagcatggccaacatagtgaaaccccgtctctactaaaaatacaaaaattagccgggtgtggtggcatgcacctgtaatcccagctactgggcatgctgaggcagcagaatcgcttgaacccaggaggcagaagttgcagtgagccgagattgtgccactccactccagcctgggagacagagtgagactccatctcaaaaaaaataataataaaataaaatatggatgatatgcagcaggttcttttttcccaacagggattcattcatttgtcccaaaataacatttctagagaaagaaatatatttaggagattggctcttttgcagaccatgtctacttttcacagggtgtaaacaaacatacacatttccaaatgtccagagctactactatcttattttttactttaataaaaatgaccatgtttgaaatagtgacaaaatattttctatagtttctaagatgcactaggacctaaaatagcaatataacctacagactctccttcttatattgttttaccagtttacatttctgaattgagcttaacttctactttgaagcagacttacctaattcatgggctgtggtgaaggcagcttgtaaaccatcatcttctatgacggagcagcttctgctcggatcacacacagttccaacatcagccatcccaagagtatcacatgtctgggacccacacaagtcctacaaaaagcaaaggtaaatacttattaataaggggagcatgacccttgggatctaacttttttggcagggtgtgccttcacatatgctttggagcatctacattcattattgttgacataagaagacttcatgtgactttaatcaagcttttttctaatgcttttaaaatagaactgtgaaacttgagatatttaaattacagtagaaatgagtaagataaaccatgctagccaattaaaaaaggttaactgcaaaaacactggtgaaatgccttgtatatatctttttggtacaacgtagactcctaagaggacagtctcacagctggtaccatcttcctcttacctgtctggtgaaaagaattgctgtgtcatagtgctctgcatcccggtcactgggtgggttgtgctgcttctgccagttgcaaaagttccgcagagtgagggcagcattggaggtcacttccggccccttctgttcatcgtggatgaccaagatcttcaccaccaccaggctaactgaattacgaatgctggggtgtttgtacaatctggctgccaccgaaaacaacgtgagaaggtaatgctttagaccactgccgtggaattctgccatcgactggtctgccacaagcatggtttccacatagcggtgactggacacaaatcgcttctttcttatgcttccagttcctgtaaagaaaaaaaaaagtttgcttatggtcaggctgtccaagaatagttaccttcctagcatatattaggaaagcctaaccagtcaaagcaaacaaagcaaaaatatacccagaacaacaataacaaaaatatttgcatatcttcactccaagtgttatttttaaagttctctcctctcctttaaataaaaagaccacgcgctcctttgcatggtcaggatctttctgtgtgtgagcaggatttcttctgttctctttgaaatcccacagtctgaacaaggcaatttcgcacataatcctacccaattgtagtaaaatcttggagcaagagcggcaggcagaggccctgagtcactctttcacaggcgagggctcaaatcctgaatgagatcatcaggctccacgtggaaggcctcgggtagggcctgggctgctgccaaggggccgggccttaaggaatctcagactgcacagctctgctgtctcattccaggggtccctggggtgctccgctcttgccaattccgggcacaaggaccacccactctgcccagcagcctctggccccactcccactgccccagcgaaataagttccagcttccaggcatgattgattatttggaacagagccttccactccggactgagacccaacccctgcagaaagtcctaaactgggctgcgaccactttgctcccaggagcagaggagcaggggaaaaggggagaattctttaaaaaatgacacgcgagagagttaaagaaggaaaaaggcaccaaagtgatgaaacaaaaagaactggagaataagcactgcacagagagaaggccgtagcaggaaggaccggcagtgactttcaacagtgcttgagagcagaattatggccgcgagagggagtgcaaactgggaggcggggcaaacccgggaaagacctcccaagcaggttctgcgaaggggccccaccgccttcagcccgcctgggtcagccttataagggggaaaggggacagaagtctgcagaacagagatcctagcgtagccgctcagggtaccttcccaggtcaccattgctcctctgccctctccacatccgccctcccgtgagcgcaggatgcacgcacaggcagcggttacaaaactcagcgcaacgttgcaacccgcacaaaaggcgcacacaaaatcattaaaaagaaatacacagagtggaaagaactcgcacaagctccaactcgctaaaggtggaaggagtcaggttacaaactctccctccccggcctaaatgctttgctttagtttgcagaaaatcgtttgtcagtttttttcttggttattcattattcgggcaaatgcaagtatgttttctagctgagttcaccaatccaaacctcaaaccacattcctccactccaggcctccgttctgtccgcggacttatgatcctgcctgccagcaggagtctaccctgaagtcgcgtgggatagataaagtgaggagaggaggatgaatggacagacaaacgagagcaattcttctacctgtgggctgtcctacgccttgcagtgccgggtcctgcggcgaccactgagccccttcgtcctcgccctcagtcccttcgtcctcgtcttcggtctccgctttcccagtcggccggggctcgtcgtccacgaccccgcacgtgccgccgacgtcgccctgccgattccgccgcaggaggtggaactgtagtggtgccggcggcttctcccctggggcggcggtggcgaggcgctcgctggcggcgggcagcggctggatgaaatacgcctcccccagcaggtagaaggcgccgcgcacgccctcgcagaggctgagggcggcagccgagctgggatcgccattcacggtgccggagtagaagcagtgcgccaggtcggtttccggaagcggcgtctcggacccggatttgcgccccacgttctggagcgtgaagccgggcgccaaaaagctgctgtcgggccgcagctccagatccagctgctggtcaaaggcgtgcaggcggaggcgcgtggtcccgtgtcccggggcgcgctccagctccggcaccactagctcctcgtcctcctcggaggggcgcccgagtgcgtccgacacggccagtagcgccgcggcgagcagcagcagcgtgggtactggcccaaagctccgagaccccggagcccgctccgcgttccccatgtcgctgcccagcttgcgccttccgaacccctcgggcacagctcgctgcattggagccccaggagacaccgctcgtagcagcgcacggagcgagggacctttagttcgggtcgggagagcaaagcctcgttggcctgctctggattgttaaaattaacaatttctattattcgttggaagggcgcgcagagccggctacagccgaagctcccggagtcactaaaaggaggcgctgcagttctgccggcgcgcgggaagtttttcttccagcgcaaagttggagacactgagaggcaggcgcaggcagagtggctctgctgggacaagaagcgctctggggcgcctccggggctgaggcaacgcggagattggtgcctggcgcccctcttcggcctccgccttggctgcgatgttgctcactctgctcagggctctcccctctccgtccggtagcgcaccctggctttgcaatagcccctggctcggagccgctttccagcgagtgcaagaaccgggcagccgagcggtccttttatagtggaccagtgaaacccccacccccaccccactcctcccctttggcccttttccatcccaaagacgccgcccccggctccgttggtgctaaaccgcgctccgcgctgcgggctcgggagggggagggggcagcctccgcgctggctccacgccactgctcgtcaatctaggggcggaaggggcgctgtgaccagcactttgtactgctggggccgctccagggagaagactctcccttccaccgcttttctccctcgccggtttcctggaccacccttcctccccaccgcccggttgcggtaactcagttaccgcgctgggctgcggttcccaggagggagggttcggttggagaacgcagtcccttcttcaacatttccctatcctggagctgccctgggtctccttccctcctccctcagttccctcttccccaatctaggagatgagctagggctacactttctagaaaaatacctcaccccacttctccaccttcccagcctgccaggagctccttagccgccgcctgctctctcttcgccccagcttttctagggaaagcttggccctgcgcttcccccagaaagcatgcctgggtgaggggccaggtgacacttcctacgatctggattttaaaatatgtttgcttatgccttcaccctccaccaacccccaccccgcacgccacctcttcaccagagacgactttgtgagggcccggtttcacatttctggaatgggtgatctgggacgcggctcaattccctagagcataaggagggaattgcgctttttcttcttcattcgagaaatgatcggctcccgccagtctgcgtgctttcactcaacagcagctgcaagccctaggccagcgtcgcagaaacggccaggaaccccactttcctacccgggggccagcagcgatcgctggggctagcaagcgtgcagagggggaaagaaggaaatcggcttccttcccggacccctccttcctcttcctaccaggaagggaaaaggctatatccgcgttacgaaagcgaggagaggtccaccaacaggtccttaggaaaaaaaactgagtggctcttctctccaaaaagtgggaggggctcaaggacccagaggaaggacgtgtttcacaggcggaaagccgcggggacaatggcgagagcgaccgccctagccccgggcggacccgcaaccctcacactcgcgcgcccccgcgttagtgctcgaactggtctccgcctttccgccccactcccgtccggtctcttggttggctccaagtagatctgggtcctttcctcgctcctccccagatcttccccacttcagttggccccagccagaagcgtcccttctagttctcccacacgtccctcttacaagctttcttttccggatgctttccaacttcttttttcctagcgagattgcttacttgaaaaacaaaaacaaaaacattgctttccactcatcaggaaaaatcaaatgagcaagaatggcagagagaagcaactcagcttacttctgaagggcttagtaacgacctctagtccctacacatttaggagtgggtggtttcgtagatttaattttggtttcctaaaatcaccctcatcgttgaacgttgaataatcaaccaaggccttagatatattttgacagcgctcgattaacattctgatagtgtttctgcctacctcttttcactgagtctctcctttgcagccctcgctgtctctccccccctcccgccgttgcatttctccttcaaactcaacattgacatccgcacacctgagtgtgtgattcctttctgcattgtcaagcattgtccagcctacctccttctcttcgacttcgaactacgaggattattccttcctgtttctctgtttcccaagcgtcttttcccaaacatctgatcattcctacttcccagtttggttttcagacttttttttttaacattgttatcttctattacagtaattttttgacggtccattttctatgatttcatttcattttactggttctttctagctagaaaaaaggcaagatacttgagagaacatatgaggaaagtcatgttagactttcaagatattgaccgcgggatcacaaaagcttgaaggcaaagccatccgtacattttcaacctcttgcttagaaaagggctcagaagataatatatggtgacaacagttacagcctcagagtggctttgagatggagatttgagatggagattttggacactcataatctccatctcaaggagaggtggcccagaggctgaatgaagatgagtgaaggtagatgtgattcccttaaattggggcaaaaagggacaaaaacagcagaaaatctgtatctttaaagacatatgtaatgtatttcagtctatcaacttctctacataaactttagcttttaaaaatatgttaacgtaagtttgacctttagtgtgtttctacctgcagggtattcttattggaggtttgtttaaaagcatacatttctgatcttgaatgggttactacaaatccattataattgtttcatatttcatgttgcagatacaagtagggttgaaaaaacagtgagttaaaggcaaaaggatggccgggaacatggcttttttattctctgggtttctatccagatttctgttcttttgcataatgactccaatctgttgtgcacctgtagttctgggaaatgattcttttttaatcgcttcaacagagacatggatgttggagttgccaactactaagctgaaaaactccatctatgctcagaagaacatttaatccacttactttttctcttttatttaaagattagcactcatcaggcatttgtggtaatatgcaaatatatacataggacatatatgtatatttataagcaaaatgtgaattggaaaaacatttgaatgtagaaacaagaccacaggagtaaatttgtacaaggcactagtaaaagtgacatgtaatatggggttcttgtagtgagtttcataatccaatttttgctccttgatttgaatgggcacccaaaataacacatgctatcctaatccctactccccatattttgggttttatttttatagaatacatatgggcttatataaacattaatctcaacatgttctaatttacatatgtaagctaatttttatttctagagataacagaacaaaactcaaaacatttgacataaaattattggaacaattaacagtttgacctattaaacacattattgtcctctatgaacagagggactgtctgaaaaaaagaacaagttgtctgcattttaaagtgagagataagcatcaaggtgtcaatttctatttacaccttatgtgttcttatttgtttcacagattcatatgttatagacacaatattctattcacaattttcacgacgtctataccaaagtaagtattcaacaagtagccatgaaatgaggaaatctggtaatatacatgagctattagaattgttttaatgtaaacattgtctagagaaacaactaatgtgcatatttcataaccgggaaatgctttttattcacattttagtaccataagattgactaattagaaatagggaagctgtttggtattagtcctacttttgggaacatatggtctaaagtaatattggacaaatggatattttaattgatcacaaatgagaaagtagttagaaaacttctagtttaaacaggttatatacccagaagtattgcaaatattggagacagaaaaattattgtagcttgcatttagactcaaaattgatattccctccacatcatgccctcacagaactcagaggagtatgatctgccagatcgactccctttgtgtaactgatgcagaaatgagactcaaaagggttaagtagttttcccaagatgtcatagcgagagtcaaactgggggcttagaaatgactctgactcataacttttaatcaactgttttgacattttaacctatctaattgtgtaggaggtaattatattgtcagactttggaatgatgttgtttccagtaaagttttgttttaattataaataggaattttccagcaataaaaaatttccaccttaaaagattctcagactttagtacatctttctccaaacacaaggtggcgatggtctacaacaaatgatgtgcgacttggtgttttttttttttttttctttcctttccttttttattcttaatagttcaagttaagaatttgcaaaagtttcacatcttctcaatcatgtttaataaattctaattaaatattctcctacctcctagtattatggaaaatattttaaaaatattacaatgttaaatgaatttattcttgagggcataataaaatgcgtttttaaatcaactactttttaattatgtgtttgtattaccataaacaaaaatccaattaaactttaaagaaagaaaactgcctctgacaaaataatactgtggaccgcttttattcattacatttgagaacttcttgtcattcaaatgaaaagattaagtacatttgcaatccactaaaacagattaaaaactcattcatttattcaatagatattaagtacatacagtatgtttagtatacattaatacttgacaatcaatactggttaactggtttccctggtttagaaattttccttagcaacaacgtaaggcttaaaatgaaaaaagaaaagtgagaaaatgttctaccaccaggtggtgacaaaagataaaatttaaaatcgctcttaatgagcacatacttcatgtaattcttgaatactgcaaatataagtgacttccgaatgtcatgtgaatttaaaatcatattctaggaatattttattaattaaagcaaattaatattaacatattatctctagtttaataagtgctggaattggaagtggacagttttagtcagcaggcggcacttgagaccatggaataagatattttaaactatttcactactgctttttttccccacccggcttataattattgattggctgattgagataggagctggtcacctccctacacttccactagcagggatttaatcagaggctgaaaatcaattgtcctttgaaagtgatttttgctaaagatcaagagcaatatttggttatatctcagcctctatcctacaatatttatcattttataatgctcttttgtgtaagatacaataaatcttattaataaccaaaaactgaattatgaattattgcaattcattggccatctacttgggcaattacaatggttagtagctcagaagcactgatatttgagcactgtatcttcagattccgaggcctgggttaggatgcttgctgctggaaacactggctggaaagctttcttgttccatgtggctctcaggtcaccctgagaactggacacactcgtaattggttgatggtaggcttgtatattcatgaaatgttgattggaaaggcctagacaatctctctaaatacataattggacaagattgttgaaaggattagagttggacactattctaaagtggcacaatgtctaagcatagaggctgggggtcttcctgttccctgcacttaataccctgggagctagtggtggagagccacgtaatccacatttgaattctggcattctgactgctgcatccttactttgtggcttcagggaagccatggatcatccctgagcctcagcctcctcatatgtaaaatggagatgacaacaatcctgacttgaaggataatgcaccattgtatttgcttcctcctctgtctcttccttcctagttaccccctcctgtttcctaaacttacttgcccttgcctccccacctctacagggactgcatgcacacaagcccttttctcaggttgtgctttctgggctaaactgagttgaaaacaaagagcatcaggagatcttctagatgggactgctcactgatcagagggcagtagaacccgtttgctggtggtgaatggaatgggaccgcccccggcatgcagtgtcagtgcaatgacaaagagtctctgtgtgggatgaggtggtagtatggggtgagaagcaggtttatgcagcagcagcggcacttagacagtatgaggaaaataacaattgaaaggaacatgtcattggatgggtttttgatagttgcttcagagcaggggctggcaagctatgaccttcaggctgaccatctgttcttgtaaataaagttttactggaacaaagtcacaatcatttgcttatgtatttttcatggttgctttcacaatacaaagcagagttgaataattgcaaaagagagcaatgtccaccagtccaaaatatttgttatctggccccttcaaaaaagtttaccagtgcctgttttgaaggttattttggaaatacagagattatatacagagattacatcgttttctaacttaatttgaagacatgccataaaagtcacttttatctcctgcaatcagagagcagacgatgctgaaaatctaaaaatgtataatcttatagttgttttatattaaagttagggtcctaatagaaaaactatgggattctgatacataaaatgcagacatttggatggatgagccccagattctcctagaccctgcagaggcagatgtcacccccttgctagaagagaacacccttttttggcctacagactgtaaagttctcagcagaggcaggtgcctcagaaggatacttgtcctgctcatcttctgccccatttccccctcattcctagcctcttaaagtctaaaatttcttcgggaacttttgttaagaaacactgaccatatgtattagtcaagattcttcagagagatagaacatatgtatttaatgagattatgaggaattggctcagacgattataaggctgagaagtcccaagacctcctgtcaccatgctggagactcaggaaagtcagtggtttgattttagttcaagtctgcaggtctgagagccaggggagtcgatgatataaatcccagtccaaggacagaagaagactgatgtcccagctcaagcaggcaggaagacaaaggaggggaaattctgaaattcctccttcctctgtcccttttgttccattcagagcttcagtggattggatcatgcccacccacattggggagagcagtctactctactggagtccactgattcaaatgttaatcgcatctggcgacatgcttacagacacacccagaaatagtgtttaatctaggcaccccttggcctggttaagttgacacataaaattaaccatcacaccatctgaattatatttcataaatattttccaaatttataaaatggaagcaatagtgtatgtatctaatattgaaagcaatatatgttgtaaatataacatatagcatattggaagacctctctctctctccatagtaaaaattctgggaatctggaggggtgatagccaaaccaaaaccaggcccaacttcactatgaagcttggtggtggttgtccattcaggtttaatatcaatctgatattgattctagtcaggtatctggctgagatttccaggatagcaacaatgattccaggaatctttcaattgtctgtctgatctagagagatttggtttgaggaatgctcattgtgtgtgtagtaggtggagatctcacacttcaggtcccatgtcctggcttccagagcagcggctgcctgctgtttcctgccagactgattctaccctttatgtcgctcctaacttaagaactccagtccactcaagagagccagctggcaggggaagggaactaattgccaatgactttataattgaatgtatatttttctacagttttgctgtgacaataataataatgcctgatatttgttgagtgcctactatataccatgcctactttatatacataagctaattaatgctcacatgtagatttattgctattaatatccctatatcattgatgaagttactgaggcagaagtttggctagctcacacagataataattgatggagtcaggtaatctgttcttttaaactttaacacaatgtactgtatatacacctgtatttaaaacattgtaagggtgatgtggtgtagagaagaaagaggactaggttgagaatcaaagtatccaattccaggttgcagccattagctcaatggcctcagttaccaactctctgggtctcagtttctaaatctagaatggattgaacagctccaacttgaatattccataagtctcagtgtcaattcggtactttgagtgatgatagatgtacagattgatgtacctttgttttaatggcatatctttgtttcataagtgatttattatatcatcaaccatggtgaggaaattattcctcaattaaactttgcctcaattagaacattgttcatattggaatataagacacacttgtttctatttccagaaacccactgtagataatggcattattgtcaccagtgtctggaaacaatgaattaaaattctaaataaggctattctgttttaggtaattttgcccataaataaactgagaaatatgatggtatacaacagggtttagtgaggatttagtgacacattttgcagattctgtaactttaaaaatcatacacagtcatgtgccacaaaacaatgtttcagtaagtgttggactgcatatatgacagtggtcttataaaaatatagcactgcctttttactgtaccttttctatgtttagatatacaaataccattgtgtacatttgtgtacagcattcggtacagtaacacattgtacaggtttgtagcctagaagcaatagggtatatcatacagccaaagtatggagtaggctttaccatctagatttgtgtaaatacactctatggtgttcatactgagagacaggactagctggatttcctaggccgactaagaatccctaagcctagctgggaaggtgaccgcttccacctttaaacacggggcttgcaacttagctcacacccgaccaatcagatagtaaagagagcacactaaaatgctaattaggcaaaaacaggaggtaaagaaatagccaatcatctattgcctgagagcaaagcgggagggacaatgatcgggatagaaacccaggcattcaagccggaatggctaccctctttgggtcccctccctttgtatgggagctctgttttcactctattcaatcttgcaactgcactcttctggtccgtgtttgttacagcttgagctgagctttcgctcgccttccaccactgctgtttgccgccatcgcagacctgccgtgctgacttccatccctctagatctggcagggtgtccgctgtgctcttgatccagcgaggcgcccattgccgctcccgattgggctaaaggcttgcaattgttcctgcacgctaagtgcctgggttcatcctcatcaagctgggttccacggttctcttcatgacccgcagcttctaacagagctataaaactctgtgcatggcccaagattccattccttggaatctgtgaggccaagaaccccaggtcagagaacaggaggcttgccaccatcttggaagtggctcgccaccatcttaggagctctgtgagcggagacccccaccccccggtaacattttggcgaccacgaagggacctccaaagcggtgagtaatattggatcactttcgcttgctattctgtcctatccttctttagaattggaggaaaatactgggcacctgtcggccagttaaaaacaattagcgtggctgcccgacttaagactcaggtgtgaggctatctggggaagggctttctaacaacccccaacccttctgggttggggacgttggtctgccccttccactttcaattttcttggggaagccaagggtcgactagaggcagaaagctgtcgtccggaactcctggcagtagccggttgagatcatggcgcagccagaagtctctactcaacagtcgcccatgcgtgcgctcctacctttcctcctgacccatacctcctgggtcccgacgatgactttcttgaaagtgtagccccaaaattctgcttacctctgaatctacttcccctgatccctggctcctaggtactaatggttcagtttcatttcctctagcaagttgtatctccaaagggatctaaggaagctctacgctgcgtccttaggcatctaggctataaacccaggaagtcttgtccctggtgtccctcccgatttaggcatacagctctcgacatgggcagttatgtgggacccgttccccatcacccttgtcaaggccccaagtttgtaatggctaagaggagagagagagaaagagagagagacggaggggagagagagagagagagatggaggggagagagagagagagagacggaggggagagagagagagagagagagacggaggggagagagagagagacggaggggagagagagagagatggaggagagaaagacaaagggagtcaaagagaaaaagaaagagaaagacagaaatggtaaaacaaacaaaaaacagcgtgccctattcctttaaaagccggggtaaatttaaaacctataattgataattgaaggtcttctccatgaccctataatactccaatactaccttgttgtcagtgtaaacaagggcgtagcctgaaaacactgagaccactgacaacctgcagctttcctatcaaaaaatccttaacccagtaaccggcagatgcattcaatctgtagcagcaactgttttgctaacagaagaaagtagaaaagtaacttttagaggaaacctcattgtgagcacaccttaccagttcagaattattctaagtcaaaaaagcaaaaaggtagcttactaactcaaaaatcttaaagtatggggctattgtgtttaaaaaaaaaaaaaggtaatttaacaccaaccactgataattctcttaacccagcaggtttcctaacaggggatttaaatcttaattaccatacaaaggtctgaccacacctaggaggaactcccttcaggacaggactatagagggttcctcccaggtgattgaggaaaaaaccacagtgggtattcagtaattgatagggagactcttgtggaagcagagttagaaaaattgcctaataaatggtgtcctcaaaagtgtgagctgtttgcactcagccaagccttaaagtacttacagaatcgtaaaaactatctcaatcctgactcaaaagtttacttacaccctctctgaaatgaatttacataagaactgcttttttgggaatgcatcttgatggggcagctgggtggttatgaaatactcaggaaaccagcccagctctaggacacatccctgagcacaaaggcaatgttgggcacgctggtaaaggaccactagaatccagcagcctggactcctttctttgtggtcaagaaaggcaggaaaacaggtgcaggactgctacatcagtgagcataactaatctgataagcagagggccttgggtggttacacaccctggaaaggaattcaactctgagcgcaaaggcaatgttgggcacattggtaaaggaccactagaatccagcagcccaggcccctttctttatggtcaagaaaggcgggaaaaggggtgcaggactgttacctcggtgagcgtaactaatccgataagcagaggtccatgggtgattacgcaccctgaaaagaataagcattaggcccttaaaggatgctctaggactaatgctcattggaaaatgactaggggtgctggcatccctatgttcttttctcagacgggaaatgttctccaccctccccaaggcaaaaacacccctaagatgtattctggagaattgggaccaatttgacccccagacgctaagaaagagatgacttatgttcttctgcagtaccacctggccacgatatcctcttcaagggggagaaacctggcctcctgagggaagtataaattataacaccatcttacagctagacctcttctgtagaaaggagggcaaatggagtgaagtgccatatgtgcaaactttcttttcattaagagacaacttgcaattatgtaagaagtgtgatttatgccctacaggaagccctcagagtctacctccctaccccagcatccccctgactccttctccaactaataaggaacccccttcaacccaaacggtccaaaaggagatagacaaaggggtaaacaatgaaccaaagcgtgccaatgttccctgattatgccccctctaagcagtgggaggaggagaatttggcccagccagtgtgcatgtgcctttttctctctcagacttaaagcaaattaaaatagacctaggtaaattctcagataaccctgatggctatattgatgttttataagggttaggataatcctttgatctgacatggagagatataatgttactgctagatcagacactaaccccaaatgagacaagtgccgccataactgcagcctgagagtttggcgatctctggtatctcactcgggtcaatgataggaggacaacagaggaaagagaatgattccccacagaccagcaggcagttcccagtgtagaccctcactgggacacagaatcagaacatggacattggtgctgcagacatttgctaacttacatgctagaaggactaaggaaaactaggaagaagcctacgaattattcaatgatgtccactataacacagggaaaggaagaaaatcctactgcctttctggagcgactaagggaggcattgaggaagcatacttccctgtcacctgactctattgaaggccaactaatcttaaaggataagtttatcactcagtcagctgaagacattaggaaaaaacttcaaaagtctgccttaggcccagagcaaaacttagaaaccccattgaacttggcaacctcggttttttataatagagatcaggaggagcaggcggaacaggacaaacggggtaaaaaaaaggccaccgctttagttatggccctcaggcaagtggactttggaggctctggaaaagggaaaagctgggcaaatcgaatgcctactagggcttgcttccagagtggtctacaaggacactttgaaaaagattgtccaagtagaaataagtcgccccttcgtccatgccccttatatcaagggaatcactggaaggcccactatcccaggggacaaatgtcctctgagtcagaagccactaaccagatgatccagcagcaggactgagggtgcccagggcaagcactagcccatgccgtcaccctcacagagccccaggtatgcttgaccattgagggccaggaggttaactgtctcctggacactagcacggccttctcagtcttactctcctttcccggacaactgtcctccagatctgtcactatccgagggttcctaggacagtcagtcactagatacttatcccagtcactaagttgtgactggtgaactttactcttttcacatgcttttctaattatccctgaaagcaccactcccttgttagggcgagacattctagcaaaagcaggggccattatacacctgaacataggagaaggaacacctgtttgttgtcccctgcttgaggaaggaattaatcccgaagtctgggcaacagaaggacaatacggacgagcaaagaatgcctgtgctgttcaagttaaactaaaggattccgcctcctttccctaccaaaggcagtacccccttagacctgaggcccaacaaggactccaaaagattgttaaggacctaaaagcccatggcctagtaaaaccatgcaatagcccctgcaatactccaattttaggagtacagaaacccaacagacagtggaggttagtgcaagatctcaggattatcattgaggctgttgttcctgtatagccagctgtacctaacccttatactctgctttcccaaataccacaggaagcagaggggtttacagtccggggccttaaggacacctttttctgcatccctgtatatcctgactctcaattcttgtttgcctttgaagatccttcaaactcaacgtctcaactcacctggaatgttttaccccaagggttcagggatagcccccattagcccaagacttgagccagttcttatacctggacactcttgtcctttggtacgtggatgatttacttttagccacctgttcagaaaccttgtgccatcaagccacccaagcactctttaatttcctcgccacctgtggctacaggtttccaaaccaaaggctcagctctgctcacagcaatttaaatgcttagggctaaaattatccaaaggcaccagggccctcagtgaggaaagtatccggcctatactggcttatcctcatcccaaaaccctaaagcaactaagagtgttccttggcataacgggtttctgccgaatatggattcccaggtacagcgaaatagccagaccattatatacactaattaaggaaactcagaaagccaatacccatttggtaagatggacacctgaagcagaagcagatttccaggccctaaagaaggccctgacccaagccccagtgttaagcttgccaatggggcaagacttttctttatatgtcacagaaaaaacaggaatagctccaggagtccttacgcagatccaagggacgagcctgcaacccatggcatacctgagtaaggaaattagtggcaaagggttggcctcattgtttatgggtagtggcagcagtcacagtcttagtaactgaagcagttaaaatgatacaaggaagagatcttactgtgtggacatctcatgatgtgaatggcatactcactgctaaaggagacttgtgactgtcagacaactgtttacttaaatatcaggctctattacttgaagggccagtgttgcgactgtgcacttgtgcaactcttaacccagccacattgcttccagacaatgaagaaaagatagaacataactgtcaacaaataattgctcaaacctacactgctcgaggggaccttttagaagttcccttgactgatcccgatctcaacttgtatactgatggaagttcctttgcagaaaaaggacttcaaaaggcggtgtatgcagtagtccttcaaaatcgaagagctttagaattgctaatcactgagagagggggaacgtttttatttttaggggaagaatgctgttattatgttaatcaattcggaatcatcaccaagaaagttaaagaaattcaagatcgaatacaacgtagaacagaggagcttaaaaaacactggaccctggggcctcctcagccaatggatgccctggattctccccttcttaggacctctagcagctatatttctactcctctttggaccctgtatctttaacctccgtgttaagtttgtctcttccagaatcgaagatgtaaaactacaaatcgttcttcaaatggacccccagatgcagtccatgactaagatctactgaggacccctggaccagcctgctagcccatgctccaatgttaatgacattgaaggcacccctcccaaggaaatctcaactgcacaacccctactatgctccaattcagcaggaagcagttacagtggtcctcggccaacctccccaacagcatttgtattttcctgttgggagggggcactgagagacaggactagctggatttcctaggctgactgagaatccctaagcctagctgggaaggtgaccacttccacctttaaacacagggcttgcaacttagctcacaccctaccaattggatagtaaagagaggtcactaaaatgctaattaggcaaaaacaggaggtaaagaaatagccaatcatccattgcctgagagcacagcgggagggacaatgaccaggatataaacccaggcattccagcctgcaacggcaaccccctttgggtcccctctctttgtatgggagctctgttttcactctattcaatcttgcaactgcactcttctggtccgtgtttgttacggctcaagctgagcttttgctcaccatccaccactgctgtttgccgccgttgcagacccgtcgctgacttccatccctccagatctggcagggtgtccactgtgctcctgatccagcgaggcacccattgccactcccgatcaggctaaaggcttgccattgttcctgcacagctaagtgcctgggttcgtcctaatcaagctgaacactagtcactgggttccatggttctcttccatgacccatggcttctaatagagctataacactcaccgcatggcccaagattccattccttggaatccgtgaggccaagaaccccaggtcagagaacacgaggctgccgccatcttggaagctctatgagcaaggaccccccagtaacaatacgatgacaaaatcacttaccaatgcttttctcagaatgtatccccattgttaattgatgcatgactgtgtgtgtataagtatttatcgccaaaagaagaaatagatttcaaatttccatattgtatcactgaggcaagaaatataaagacgtcagtcatatgacttttcacttaaggaaacaaaatggactcttgagtagataaatatgatgattttttggaactcatcaacatcattctcatgattcctgatatttatcaagcacttactatatgcagacactgacctatctattcacatttatttagcttggccaaaatttatccctgtatttttaagagaatgtttcaacaaggaaaagataaatatatgacaatcttttacatctttacaaaaaccctataaacatttctacctggaagaagaatgtgacactaacccaaatttaagcagctggtgcacatccaaattcaaggcaactgcacaagctatatatactttacattagaaattagagaccaaataaacagaagcaggtgaaccaaaagaacattacaagagattttcagacacccattaaacacaacagctctgttctgaacaactcctgtgcgataagggaagagcaagaactcacgtggtatgagaaatactgcaataagaaggctcaagtaaatccctttttgggtctatttttgcaaaattaagaattaaaaaaaagaaaatttgagacagcacatagaaaaaatcaaaagcataaaggaaaaaagcctataagtttttaagagaatagaaaataactttaatgaattaagcttatacccaaatgccatttctgagtgtctgtaggacatgccttttgagggaaaattgagtctgtcagtcacctcttccctgtgttaagcctaggtgccaatacttgcctgaggtttaaacacagacttgaaggttttagaggttttagtaccattaaaaccagatttgaagtttttaataccactaaaacaaaagaaattagatttttcccatcaactatatgtcaaatcacagatgtctgtctgttcactttatttgcatatagaaaagagtgcataatgagaagaacttctcttaaaatgctatgcctttttagccatttctttactattttttataattttattatgctcttcttccccactttatattttgtacactctagttaaaacaagtacacaaatcttattattttataagaatattgcaaatggttgttgacagcttcaagtacttcagtgtatgcatacatttcatggtttttttttttttttttttgatggagtctcactctgtcaccaggctggagtgcagtggtgggatcttggctcatcacaacctccgtcttccggggttcaagcgattctcctgcctcagcctcctaagtagctgggactacaggtgcgggccaccatactcagctaattttttttttctttttgatagagacagggtttcaccatgttagcctggatggtctcgatctcttgacctcatgacccgcctgccttggcctcccaaagtgctgggattacaggcgtgaaccactgcacctgggtgcataatttccatgttaagaaactggaggaaaagaagttttcttatcaattcaaatgacttttaaaagattgtatcatttttctgtgacttcgtcaattttattttctctctttttttccctcctcgcttctttccttcctctctttttatatttttatttatttatttttctatatactgtgcttaacacagattttttaatgtttattaaattcctactttgtgtcaggtgctgtactggacactaatggtatatactttgcacccaaagacttcacagtcttatcaagaattgctagaatacttctgttttagtgtagttagtgatctacagggaaaacagacagaatagaggggttgggaccattaactctgttcaagggtgcggggaggagggagcagagacgttttacaaagggagagttattgatctgattttcttcattatattattttgagacttgatagatgtatcttgtatgtgaataatatttccgtttctgtttcttctgtaaaaagttaagtatatggaacacttcacttcttttggaaaggtcacgtgttctagaaaagatttttcagttgaggttctactcatttacattagcacattttagtctgtgtagcttagtttctgcattctaaattgtccttattaatcgttcttctgttttgaagcaatataaaatctatatgaccacacacagatattcacatatgaaaagagtttattactaagaaatatagtttagcagtttcaggaaataacaaagaaaattatgctaaacctaattttaaaatctaaatctaaattatgctaaaatctaattttaaaagcataatgagtagctattgtttaactcttcctgcttatctgtaaaacttttctttagcatcatttgagaattttatcaatgcctctttgttctttgaaaaaaggaaaaattatgagagcttataaaactcaaaccctaaagtgtcattcactacttagtttaaagaatgaatctggggcattttttcattgtaacgaaaaactttaaacttggagtcttcaatttaatattaaaatattttaaatattttgcattaatattttctcctttacatatggtttacttattctctttattctcttttttttttttttttgagacggagtctcgctctgtcgcccaggctggagtgcagtggtgtgatcttggcttactgcaagctctgcctcccaggttcacgccattctcctacctcagcctcccaagtagctgggactacaggcgcccaccaccaagcctggctatttttttgtatttttagtagacatggggtttcaccgtgttagccaggatggtcttgatctcctgacctcgtgatccacccacctcagcctcccaaagtgctgggattacaggcgtgagccactacacccagcctacttattctctttaaaatgattgtgtgtaagtaataggaaaaggctttttgacttcttgtattttttccctacttttctaattatttttgttaaggatggtacataatagtgaaatggttgatgagcagaatcttatcttcctaagaaaaaacttgtttccacttccttttcttagagaagagggaaatgcatatattgagaagtaaaaattacaaatgaaaaataatttagtttttgtcctatacttattttttgtagactacattatatagctatatttatatgtatacacacaaacattcatacattagagcaatcaatatatgcctttacttatatttttacaaattgtgatagtcttacagtcttgaattattatctcaattggcactttgaataatatatcatttttaatgtgaatcatttgaggagtagaaaagtgccatttgaatgcaatatgtattaaacccaaaaggtcttttttcctcattcattctctggtagatattaatgtaagtgttaatatataggctcaatggttccccaagaaatctaaaataattaagaaaataatcacaatgaaaaatgaatttttctgattaataaatgagtcaaagacataaatcattcaaaaaaattagacaatccaaggcaaacatatataaaatatttttaacaatacttgagtaaaattgatttagctataactcacaataatgatgatgatagtggtggtggtataataactcacatttactcactactggggttttcaggcactacattaaatacttcccatgtattagtttatttcttcaaaagcgccctctgtaatattttctattaatcgttggaagcttagaaatgttaattgacctgcctaaggtcccatagctaagaagcagtttatgtagtcattataaactgtctaccaaatatttctggttctctttccaagcacatgttagtattgtacttccctacccacttgaagttaggtgtgtctgtgtgacttgctttagtaaactgtgagccaagtgacttaaattggccaataaaatgaaagcagagtatgacttccagttggaaactctgaagccactgagtgctttgccacgctccctttcttttcctctgtaatgacaatgcttatgtcaaaatcactggctgctctataagcctgagtcttggaagaatgacagtgacagcagagcttacaaccataatggacaagcagattcaagatgctggcaggttcagtgtctggggaagattgattttcagttcatagataactgtcttctagctgtgtcctcacctgtttgaaggggctgggggtctctcttgggcctcttttataagagtactaatcccactaattagggctcttccctcaatgacctaatcactttacaaaggtggctcctcctaatgccatcatcttggtgaggcaggagaatagagtctggaggcaggaaacctgagaccaatttatgctgacttcctagaattaaatctaaaggaaaccccaactttccatgcccaaataacaaaaggatcaacggctactcctttggcagccctccccttttgtgctttgcagataaaaagtggaaagtacctctgataggtcccctcctgtaaccagtcagtctggtggtgggcctagtctaaatttgcatagggatataactttgtaacttcacttcagcctctgattggttgccttccataaccaatcagactggtcgggggccactcaccacgtaaccaatgggaaacctctagagggtattaaaatcccagaaaattctgtgaccagcactctggagccgcttgcttgagtctgctcccactctgtggagtgtactttcttttcagtaaatctctgctttcattgctttattctttcattactttgtctgcatattttgtccaattttttgttcagaatgcccagaacctgcacaattggtagtcaaaaccctccgcctgtaacattaggggttaggattttaacatataaattttggaagggacacaaacattaagaacatagcactattttactgaaaactaagaaaatcaagtaaaaactgtatacaatataatagcattgtcataactttcacatatataaaaagcaagtagtttaaatacataatgtaagaaaagctcccttcacaactataaaaaattattaaaatcttaaaaaggagcatgaaaaaatatattaaagatttgctgaaaaataataaagttaaaataaacaactcgtgtgggatgcagaatgatttgatcaaatgatgtcataccttactgtggaaggctgagtccatggaaaactcaacattataaaaatattagttctccataacttatacacttaacatgatcacaataaaaatattaacagaatattttttagagggaactcagaatagcaagtttaaaatttatgtggaagaactaattcaaaggagtttagcttttgcttaggatgtataaaactgtcagagaacactgttagaagaatctggatgatcaacaaaatcataacttttcttgaactgttcataaagctgcagtcataaggaactaactacactaaattccaaagtataacaaacccttccgaggcgagaactcacaatttttttttcaccattagtagggcactaagaagagttacctactgcaaaggtgagtaagaaaaaaaaaaaagcgaagtattagccagcatgtcagagagtccaaacatgagaaagctctgcactcactcacaagctggacgttttcctccccttggtgatgctaggtacaaagctctacctactttctagaattatctcttatttgaagccaaagttaaaggggaagaatccactaactgtgggtgtaaactaaaacaaaactatcttccttgagcataggaagggaaaacaaagtgaaagaaaacattccactcccggaggaaaggggaagagacccaggaagaggtgagatttctgtttgattccaaagacagggaaaagccaatgtgttagttcaaaggtagtcaggtaggaagaattctttcttactagggagagggcccaccttttgttctatttaagcctctgattgattggacaaggctcactcacataatggagttcaatctgctttactcactccattgatttaaatgttaatctcatgtaaaatatcctcccagaaacactcagaataatgtttgagcccagatctgggcaccctgtgacccaatcaagttcatagataaaattaaccatcactatgtgcttttgcgtgtgtgtgtgcgtgtgtgtgtgtgtgtgtgtgtgagtgacagggtcttgctctgtcacccagactggagtgcagtggtgtgaacatggctcactgcagcctcaaccttctgggctcaaacaatacttctaccttagcctcctgagttgctgggaccacaggtgtcagacttcataccccaccagctttttataatatcaaagaatcaaagaatgttaaaatataagcaatttcagatacattagaatacaggtatatgatttagtgctatgttgcataaaaatgccctgagaagaaactttaaagtcctggtaaatttttatgatatacttttaacttattaaaatgtttacagagcattatgttttatatgcctttttaaactatgtaaaaatgcatgaaagacatgcagatatgtatatgtgaatgaatgtctgcataatatatatattgtgtgtatatatatgtcaaacaaaccaattttcttgttatactggtaaaatggtgtatttctattaaaatgataattatattttatagaaatacatagaaaatactacagaaaatgctaagtcaaaagaaagggatacaataaagaataaagaaacatacggcatgtttcatgtagtccatcttccacaaatttcaaaaatgacatttttgttgtatgagtttgtttgcccctttggcgcttcaaacaaagcttcctagtcatttagaagataaaattcaaactcctgttgtgccctgggacaacctgtctagggtcaactctcagaagcccttcttgccctgtgaattctcatggtacctaactctgttgttttctgcacacacaatgctgctttatatctctgtacttttacctagtctatattcccttcctagatcgatcttgaaacatcctttacactcttgtgaacctgaaaaacatttattatttttagtactctgctcttctggtgacatcatgttgacgaaatcccacatggtgtcagttttctcctgagaaacaaacaggctgaggtaggaacatcttcctttcttctatttttattgctatatatatagttattttattaccttttatacgtataaaatttctgtaattgtttggttactgatacagttttcacacaggagtgtaaacttctcaaggacagtagttgtatcttatcaccacctgtaactaaaaaaaaaattctcaggcactcaaccaacaaatatttatttcaaattaattgaagtgaaaactattaagatcaatatggaaataatgtttgtctatgatggaattctgaggaaagcatacttccttaagtaaattttacggtgaaggaattattaggaagcagatttcttaatgttgtcctttgcgtttcttagttttaagtaacaattgttaagccatataattgttttaggtaagaaactttaatacaagacttggctaactggaggtctttatttaaatgtacaatacaggattcaaaaattagtagacttttctttccatttcaggcggtattttggactagattgccttaagattcctcctatggaaaagagctaaaagagacagagaaaatataacaacaaactctttatgagtgcatcttgtaaacacacaagaaagtaaggaatttttagagggcaaagaatcaacagaggaaaacaaaacttagatgtaaattctccttgaggaaattttctgtagggagaaagtttgtttttaaggactgtccataagtggggaacacgggatcaactccatacaagatggatattcacaggcaatcacttctctacatcccatatatttaactctcaggagaggacaagaaaaatagtccatcttagactctgatgctgtatagaggaaaaagaaaaattttctttgagactctgtaaccataagccatctgatttcagttttatagacagaattcatacttcctgggtggtctcagttctcagcatacgctcagtgtaatgtggtcctggttactagtgttcctgggaccttgcaggtccagacaaaagccctctcccatgaaaactaccacagcttgaggctcaaataatatccatagaaatatgagctcacagtaaaaacaaaagtgaaacaaagcaaagcaaaataagcaagccttgatgagtgagagccaccagaaaaaaaaacaaatcatagaatcaaatctgaaaaaagatgttaaatgttggaattatcagacacaacatataaaacaatgatttgaaaataagttacgagagagtctgtaaaaattgactgaatacaaaatccgaatatgatgggtttattagcagattagacaaagatgaagagcaaattagtgaactggaaagagatatggagaaatttcaaagaatgtaagaaagtccatgggatgaaagatagagaagacatgttaagtaaaatgaaagatagagtcaggttaaaaacgaggaattaatatgtaaacagtaaatttatcataacggtaaaaatttaggtgaacaaagataaaacgaagacttaacccttttccggtttagaaaaaaaagtgcagctcactgccaaaacaatttcacataaatatgctctttgaggctgaagcaaatctgattgattttcaacatgaaaataaaatatataagctgttctcagagttatttctaaccagaactaacatcagaattgtctgaatcatgagaattatctatttcggaaaaatcagattcatcaaatgaatctttgatcagcaactgttcaagaacaacgttaacatcacatgtaggaatgctagattttctaggatttgatatatttagcaatggagaattgccatattttgcaaatggaaatgccactactaaaaacagaatgctgtaaatagaatgacgttttctgtttctgaagttgatatacaagagcaatgcgaaaacaataataaaagcaaaatattttgtggcaaatttatctcagggtaaatgctgcagctgcaagcactgcagcttttatctatgcaaactttttgaaatgctacatcagtgagtattctcagggcaaatgggaaaagggttacaacctcagccagaagtatagacagctatgttcagtcagatgataattattctgagaaatgatttctccacagcatcagtgaaagcttgaggaaagtggaatgatatatttaatatcctgagagaaagtaactgtcagtgcagaattgtatactagaaaaatcacaagaattagggcaaaataatgacattttcagataaaacctaacagagtttgtccacaatagactaaggaaaacctaaaatatgtatttcagtgtagggtccagccctacagggcctgtgggtttttctcttcatgtgcggagaggagagatcatagaaataaacacacaagacaaagagatagaagaaaagacagttgggaccaggggaccactaccaccaaggcgtggagaccggtagtggctccgaatgcctggctgcgctgttatttattgcatacaaggcaagaaggcagggtaaggagtgtgagtcatctccaatgagaggtgagatcgcacgagtcacgtgtccattggacaggggacacttccctatttggtagccgaggcagagagagacaggggacagcttatgtcattatttcttctatgtatttcttggagagatcaaagactttaatactttgactaattctgctactgctatctagaagttggagccaggtgtacatgtcggagcatgaaagtggaccaggagcatgaccgctgaagcacagcatcacagggaaacgtttaggcctctggatggctgtgggcgggcgggcctgactgatgtcaggccttccacaagaggtggtggagcagagccttctctgactcccctggggaaagggagactccctttcccgatctgctaagtaacaggtgccttcccaggcactggtgctaccactagaccaaggtctgctaaatatacttacgggtgacttcccagacactggtgggaagtcctctagtggccctgtccgggcgagacagagggctcacactcctgtcttctggtcacttctcaccgtgtcccttcagctcctatctctgtatggtctggtttttcctaggttataattgtagaacaaagattattataaaattggaataaagagtaatgctactaactaatgattaataatattcatatataatcatatctataatctatttctagtataactattcttattgtatgtattttctttattatactggaacagcttgtgccttcggtctcttgcctcggcatctgggtggcttgccgcccatatttcaggaagaaagaatattatcttagacagaagtttttgtcagggggtcaagcaacaacttcattgtctatataatgattccagagtgtataaaaagaaagaaaaaattagctctttatatgaaaatagcgtaagtttgttagcaaaagtcccccaaaaaatgaatgaagaaggagaagagatatcaggtcatttcatttgtggcattgatggaaaaatgtttagtcaaatattagagcaaacataactgagccatgtacaataaagaatataaatactttttgaccaggtggtttaactcagaagtgcaacagagattcaacataaaatcaggccaggtgcagtggctcatgcctttgatcccagcatttggggaggccaaggtgggaagatcgcttgaggccagaagtatgagaccagcctggggcaagatagcaagactcagtctttatttaaaaagaaaaaagaaaaatcaataaatgcaaataaatgcattaataatttgaggagaaaaacttggcaattgtaggaaaagatacctaaaaatagtaagttaagaaaaagaaataaaaagatggcacaaatagaaaacaaagctaatcactatgagtagatacatcaaaggcaactgtactaaatattccgaagacaaagattaaagattgttagatcaaaataacaataataataataaagaaccacttgtgtatactcctacatgggacataactttttaagaaggataaaatatagataggttgaaaatagacactggaaagggtatacgtattaggctattcttgagttgctataaagaaatacctgagactgggtaatttataagaaaagtggcttgattgggctcacagtccttttattttttttttttttgagatggagtctcgctctgtcgcccagtctggagtgcagtggtgcaatctcggctcactgcaagctctgcctcgattgggctcacagttctacaggaagtatgccaccggcatttgcttctggggagacctcaggaagcttttactcagggcagaaggtgaagcaggagcttgcatgtcccatggcaaaagcaggagtgagaaaaaattagggagagtgggaggaggtgctacacgctcttaaatgaccagatcttgtgtgaactcagagtgagagctcactcattatcaaaggtatggcccaagccattcatgagggatctccacccctatgacccaaacacctcccatcaggccccacctccaacactggagattacagttcaacttgagatttgggaggggacaaatatctaaactatatcaacatatactaaaaccttaagcaaatatgtgtattgtgaatgtcttgtcctaatctatgcaaactttttgaaatgctacatgatatcttccaaaaaaacagaagttttaagttctagtgcagtataatttatcaacttttcctttcaggcttagtattttctgaactttgttttaggatttttgcctaattccaagttacaaagattctttcccttttttatttagatgtttataattttacttcttacatgtagagcaataatccatttcaaattaatatttgggcatgggaagtgaagtagagatcaaattttattttatttttatatagatacataattgtttcagtactgttctagtgatcaatttctgccaaaaaccaaccaagcaaaaacaaacaaaactatcccaaaacttagaagtttaaaataaataaagtgagtaaataaaataaaatgggtaaaacactcattttatttttttccatgattctttgggtcaggaattatggaaaggctcagcaaggtggttcatctctgctctatattatctgctaggatgcctggctttgaaggatctacttccacaatggcttcttccctgttatgtctggtgcccgggcttcttggcccctctctatttcttaatctccacatggtgtctcatccactagggcttctcaatgtggcttgggattttcacagaacagtgacccagagtagttgaactttttacatagcagctcatggtttcaagagaccaaggtggaagctaccagcccacttatgacaaggtccagaaatagcattataaccaattctaccatgctatgttggtgaaaacagttacaaaacagctcagattcaagggaagggaaactgaccacatctcaatggaaaaaaatgtgaacaaatttatggccatcttttttttattattatgctttaagtactggggtacatgtgcagaacgtgcaggtttgttacataggtatacatgtgccatggtggtttgctgcacccatcaacctgtcgtccacattaggtatttctcgtaatgctatccctcccctagccccccaccccacaacaggccccggtgtatgatgcttccctccctgtgtccatgtgttctcattgttcacctcccacttatgagtgagaacatgtgttctttaattggccacagcatcatatagagaggaccattctttcccccattaaactgcatcatagttatcataatttaaagaaatattggcctatgaatctatttctaaactgtttcataaaattaaacatgtacttaccataggacctagtaatcctacacctcagtatttacacaatataaatgaaaagctatattaacatagaaacccaccccatgaatatttacagcagctttatgcataattatccaaaactggaaatgattctaatgttctttcatcagtgaatggataaagaaactgtagtgtagtgatacagtgaaacttatttagcaaataaaggaaataactattaatttacacaacaacatagatgaatcttaaatacattttgctaagcagaggaaaccaaattcaaaatgtcatatattgcttgattccattcataaagtattatataaaaagcaaaattataggatgtgtatttgtcagggttctaccaagaaacagaagcaataacatacgtatagagatatataagagatttcttacaggaactggctcatgcgagtttggaggctgaaaactaccttagtattctatctgtgagctggagactagaaagccagtggtgtaattcagccagaatccaaagacccaagaaccaggggagttgagaacagggaggggggttccactggtgagaactgaatgttccacctctaaaagagagagagagaaaattcgcttttcttctccatttttgttctatctaagccctcagctgattggatggatgccggcccacatgggtaagggtggatcttctttactgggtccactgattcaaatgacaatctcctctacaaacaccctcactaacacacccagaaataatgtttcatcacggaaatgtctgggcatccctcaacccagtcacgttcacacataaaattaaccagtgcgggatgaaaaagaagtctagttgctaggtgttggggtgaggggagatgttgacagcaaaatgtcatcataaaggaatttgggggctgatgaaacttttcaaatcacaactatagtggtaggcccatgactccattcatttttcaaaaccaataaaactgtataccacaaagaatgggtaagttaaagctaaattcaaaaagagcatcacataaatactgcattgcagttagtagctttgtttcttatagagatatgggttagttattctgaaactaatttatgtggacaccatggttgaaaacacaagtagatatatgtagaaaataaaagccaggtttctttcttattgtttgagaataaaagtttcaaataagtaaaggaggaaggttagaatgaactccgtgctgctagactggagttggaaatatctgtataaaggtgtgtgtgtgtgtgtgtgtgtgtgtgtgtgtgtgtgcgcgcgtgcgcgcgcgcgcgcacagaaataaatatataatgtgtatgtacatatgtatgaggtagtatacatacacatttcttcacactctgtctgctgaaagggtttaaaagcaatgacaacccagtagcaataagaacacttgaagcccagattttgattttcaagtaacattctccaaagaaagaaaccacgctccttggtaaagaggttgcttggacaaggaaaatataggacgtgcttgaaatatcttgtggtaccagaaagtaaagtagttataactataaattacttgtgttaaacataatttttggcaagcaaaagtatactgcagaatacttgcagtatcattctatttgtgtgacgtctacaaataccccaaagtagacatattgttaaaggatgcaaacatacatggtgataatctaaagaaaatcgacgacatgcaattcagaatgctatttttcttctttgctaaaaacaaaaacactgtggaactttcaacggcttaatggcttccccagtcagaaagactttcacttcctttatctcacatatatctttgtattgttacaattgcttccatctgtttggggttcagtagatctagtgattgcatcctctggatagtagccaagcttaaaattgaagattgattttagctttctttcgctagggtaaatgattttatatcttaatgctcgtgttctctaatcatttaaccctatttgcattatttctttggtctgctctgagttttcttcacgttttggctggcaaaccttgatgtaatgctgtggaattgactactcctaaacataatgagtggatggcctcttaattccttcatgctgtgcactctatgatatcagtgagcaaatccaaaatatattggctctaaatgcaatttccaaaaaggctttaataagatagatttctattccacaattcctcagaaaaatacccaagccttgagtggttaaaattatctgtcccctgtctttagtttttaggtatttgagagtagcatctctatctatgcaaatagtccatttatctaacccagatagtttttagtcatagaaatacttctataaacagtataaataatactataatgaatatatgaaaatataaattttactttctccgattatgtgtggaatttattatttcaatattttcatataatttaatgcttacacaatacactaaatgtaaacaaatgcaccatgagagcaagatgaaaagaataattatactagaagttacaaaaccattgatacaattcaaagttttctctaagtttcatacaacctcttggcaaataaatgtattagatttattcttacgtcacatattttaataataagtaatatttattatattaattatacttatttatccaaaataaatgtaaacatgttttcagaaaaaattgatctaactaaatgcaatgtggtatcctgtattaacttctgaaacagaaaaagaattagaggaaaaactggtgaaaccagagtaaagtctgcagtttaatttatcaatgtattgatgttaatcttttagttttgacaattaagccatggttgtgtaagagggttacattagggaaatcagactgaagagtacatggagcctctatgttctttgcaactaaagcgattcaaaataaaaagtttatttaaaaatactgtatgttatttttaagtaaacattttatttcatttaattaatgtgtttcttaaatcttttgacattttttacttaagagaataacttgcataagaatctaaaaatgtagtttctaggccaattatttaaaattatagattaaaattaatggtggcctttatttagaatttttctatcacgtaaacttatataaggtaataacacacatttttgttttgaactaatgctttgaaactgtatttcctggaaattgggtgacattaattgtcattttgtaattagaagttatataacttaaatgtcttttgtttgtgcagtatagaatatataattgcttgtagaaaatataattctatcttttatgaacaatatttcttttggatgaattcagttatatatttggtataaaagtccttaagtaccaaatagaccttctattgcatacattttctgttaggagccaaatgagcagtacagataactattgacattcttcaggagtttaaaatataaatatgtacaagacaaaagtagtacacaattttagtgtgaagtctaatgtggaagtcagaccaatgaacttgggggaaagcctcaactcatttctgaggctgcatttcccagtttgtgaaagaagaaaaaccaaatatattgtacttcttaaatatgctatgaagacaaatccatgtgggtatttaagtgattctggaggattctatttaggtataaacaacaaattaactaatttgctgcattttgtggacaacaaacaaatagtactttattatggatgctgcatgttttccccattattggaagtgatggtttctcgatatactaacaaaatagagaaggcaataagatttgcacgctttacatatgcgtttatttttcaattaatagctgatgtttaaagctaataatgactctgagaagtacagtttttcctgtttgtggacatttatgttgattcccaaacagaactggcttccactatatggagagcaatcgcacaacattgattggctttaaattattgtcaatgtacacacactaaagtgggcacagtatactttcagaggatacaacctttaaaacaaatttgtgtttcatcataccatgtggcagacagtaaataatctttttttttttttttttttttttgagacggagtcttgccctgtcacccaggctggagtacaatggtgagatcttggctcacagcaacttttgcctcccaggttaaagcgaatctcctgtctcagcctcccgagtagctgggattacaggcatgtgccaccacacccagctaattttttttttgtatctttagtagagatggggtttcaccgtgttggccaggctggtctcaaacttccgacctcaggctatctgcccgcctcggcctcccaaagggctgggattacaggtgtcagccaccacgcccagccagtaaataatcttaaagcttaaataaactcagtgaacatgttgtagtattgtgtggaatgtattcatttatatcattgatgaattctagatttgtacagcttcttttctccagttactcctttctcacactgaagcagaatttctcaaaatgggtgggttcaggagggaagcactgaaccactggtgaaccatggggtgaagtcagtgcgtgggttcagaaggaagcataggtaccatttctcaaaaagtatccttgcctttggtggattactatctgtaattcactgtcataaattcttaagtacatgaccagagtggttttgcttcagtaagacaacctgacttctacatggtaaactcctgctaacccagctcttcaatcagacccagtgggcttcataagctttctcttgagaatctttagccatggctctgtctgattacaagtcttcttgccggctatctcaacatgttcaatacattattttctctgtttatcttgcattcgctctcattgtcttttgctttacctctccattggccttagctatgacccgtgaaatcttggaaggctcttccaccccactcttgtctgatgctagctgcagcaaccacctctttcctggaatccttgaattaacccctttcattttgacacttgtgccacatccaacaagatttaagataatttggaaaagcaaacataacaaaaggcagagcaatttggaatgaaaacaaaaacagaacagaggtcaccagcaaagagtaaaaagagtaaacatgaccaaatacctgagattatttaattatcataattgggcatgaagtttgatttgcctggaagcaaagacattttttagttacaaaatttaaatgataccaattcacttaacttttttttttttgcatgtaaaagaggtgctctcataaggtacattaaaaatcaatgaaaaactactatggttttaccaaaaatagctctaaaattgtgtttaaagagatgatgtttttactgacccaagagctgaatattatattataaatttataaaatatttcttatggatactgtattaatattttttagatttcctattgttcaatgatctacttaattatgggaatgggactttgagaatctaggtgaatgggtggataatatgccaaataggctcttcaatgaatgacctgtcaatggtagatcctgggtgacagtcaataatattttccatttctaacctaaagcacaaagatccttgttgttggtcaaattcagaactatagttttaaaaaccccagatgttagtgtaagtaattttattattttgctgtagaattttgagagcagattttatacttcacctgaatttcaagccactttttcgagatacgagtaagcaaagcagaggacatttgttagagctaatatatatattttttcagaatgtgtaaatgtaattgatggagttagattgatgagacctaggtttggcttgagctccactgcttgcaaatcatgcggcattagaaaagcaattcaatcttttctggttgtgtcaatcaatgacatagatcctctaagcaaccgtgggagcattaagttttttaaaagggaaacagtaggtataattcaaagtcaaactttacatgaatgtaagtgctggggtttatattgaggttggagaatataatggatgagattggtgggggttgaatcccacgattcaaaaaactcaaggaaacttcacagcttctgctttattacagaagacaagtgaaaagtgtctctatctaaataaactgtgcagttaatgtggacaactaagagcataaacttaatatgctaaagttcaattaaaacacacactgaatttccagcgtttcaattttaatgttatgtaataacaagaccacccaaaaggtggcactaaaaagcagatatgtgacctccaagtaagtagaatttggtgagataaaagaaatggtagagaagctttagtcttcttttaggtttaaatacttaaattgcttcttagtaacttgtaaatattaagctgtcgatattttgaagaaaagctgctattttcaatccaacttaaagcatttgaaattcatttgtcttgcagctatgtatatttaatttaatatctttcagcctaccaaactagtgatctttttttgtgtgtaatcatcagagacattggcatatgcgggctaatctgattttctttggagtcatgcttgtaccataagttttgaatgaacagatgcccttatctgaatccaacttcacactactgtgtgcctcagggttacagaaaatagactgtttaatgaatgacctgtcaatggcagatcctgggtgacagtcaataatattttccatttctaacctaaagcagagagatccttattgttggtcaaattcaaaactgtggttttgaaaacacgagacgttagtgtaagtgggtaattttgctattttgttgtgggattttgagagcacattctgtacctcacctagaattcaagccgctttatcaagatggtaagtaagcaaagcagaggacatttattagagctatttttttttcagaatgggtaaatgtaatttgatggaattagaattatgagacctaagtttgatttgaatagaagctgtgaagtttccttattagagttttttgaatcatgggattcaactcctgccaaccatatccattatatcccctcccccactataaatcccagcacttacattcatattgactttgaattatacctactctttcccttttaaaacacttaaaaatcagtaggctcctatggctgcttagaggacctatatcattgattgacacaaccagaaaaaattaaactacttttctaatgccttagcattttctaatgctagtagagaatgttatgttcaaaccaattttttttttttttttttgcctgcaatcccagcactttgggaggctgacgtgggtggatcatttgagctcaagagctggagatcagcctgggcaacatgacgaaacctgtatctacaaaaaaatacaaaaactgctgcgtgtggtggcacatgcctgtaatcccagctacttgggagactgaggcaggagaatcacttgaacctgggaggtggaggttgcagtgagccaagattgctccactgcactccaggctgggcaacagagcaagactccatctcaaaacaaaaacaaaaacaaaaactatctgggtccggtggcttgtgcctatgttcccatgttcccagctactccagcagctgaggccagaggatggcttgagcccttgggaggcagaggttgcagtgagctgggatcatgccactccagcctgggtgacagagtgagaatctgtcaaaaaaaaaaaaaagaatataatgcattcatattgacatattttacttcaaactgatagaattttacagaattttctatgaaaagtttatcagtagctacacattctaataatgtattaatatcactgaatatcaggtctaaagtagtagttgttttatagtaacagtaaaaaaagaatgctactataaaggttaacagtgaatatatttcagtaaataaaacaatatgctacctttctgaggttatttgggagatgcaacaaattgtgctccatttacccattcagcttcaattaagaaacgtaataaattagttcacgtacagagaataaaatataatcacccttattacagtcaaaattgaaattagagaatgtgttttgtatctgggagcatgtggacttctgcaccgaaggcctgatttatatagccttattcaccttgtcacagcagtgcttgactgggcaggctctacctatgaaaacagaagtcacccacagagaagtaaagtagaacatgggagcagctgtttcttaagagaaacagcgaaggaagatgtgggttccacttgcccaggtcttccttctaacatcacctgtgagataagcccctcccagttatataaactatttggaaatgagtgagaaagcaagggaagctgggagtatgaaggaatattttccacagagaggaaaacacaaggaataaagaagtacttcctacccatgcacgcatggtctttctaatgaaggggttcttgtccattatgaaacagccttgagtattccctgatgacacagtgctggagcacaagggaagtttatcttgcacaatgcctgttattttagaattctctctaggagaatgaaaaggcacttgaagcagtgaaacagcaaaaccagtgctatggtctgaacggtttgtttgttttcctactcccctaaattcatacattgaaatctgatttccaacatgaaagcattagatggtgaggccttggggatgtgattaggtcatgagggctccaccttcacgaatgggattagcacccttataaaagagaccccagagagctagctagcccctttcaccatgtgaggttacaatgaaaagatgtctgtctatgcagaacagagtcctcaccagatactgaatctcccggtgcctcgatcttggacttcccagctccataactgtgagaaataaatttatgttgtttatatgctactcagacttaggtatttttgttatagtagcctaaagagacgaagagaataagacagttgctagcttccacctttcaaagctcttctggacattcaagactatttggctttatcacatcaggtgcattctagaccatctttattggtcagcttagctcacatccatgagcggcaggcttttatctgtgctaaggagggaatctcctagtatgcctgggctcttggccttcacattctaagatcatgctcctattcatgctgctttccatctggtctgacagcaggtgacataagtgggtctgctaggacaggcaggtactgtcctcaatttttctctacaggtagtaatgctccaatgtgtaaaacggcagttctagacttaagaacttcactttctacataagcttagctgagataattaatacaaatttacagtgatggcaatagtagtgttaagtattctgttcactcctatacattttatggcccacttgcaaggtgagactatgtgagctgaaaggaattttgtcttctgattagaggcaataaaaattccttgcacatttctctagtttttctcttcccttgccattgcaactgagcataatgtagcaccaaatatgagagcctttgtttactgaatacctgagtgacggcacagtagagctacctgatggctcatatgggacatttagtgtaagaaaaaaacttctgtgaggtcattgaaattcctggattttttgttagtacagcacaaattaacctatcttgactagtgtagttacacagagcttttgtatgcaacaagtgtgtgtttcactggaggcactattaggagaaattgtgcaaatcctcacaaacatgagactggaacaagcttttagaagacagttaagattataggataagttgagaaagccatgaagacatattgagctgggaactctagcaaaggagtgggaagagaaatgcgtatggtacagtaaagctggcttgaagaggacaaggtgtttaagtcatagagttatataggatgaactttcatggatgtggagaatccagagtgaggaaacagcttgagagttcacatgatgtttttaaggaagatgaggagcaaaaggggccagatggaagcagtaggcaaaagctcaggaagatgatgttggcggtgttgctcacaatacctagacaagatgatatttcacctaattagttagtatcagagaaaggttggcatgtgctggataatttgtaactataataatagatttattggagcattcagttataaatcatgagtgagaggaagagataggaaacaaaaaacactaaaaaaaaaaaggagttaatgaagaatggccatgcctctacagaaatagaaggtgaaagagaactaattagagtgaagataactgatttacgattgaatacattttgtttacaataaaggcaagctctctggacagttgtatgtaaggaaataaaacaattagaagtaagaacaggagttacatatttgggattaatgctaggtgatgataatttgcctttagattataatcatatatatagagagaattatctatctgtacaaagatgtgcaaagtgctgatgagtgtgacttgttcatggtagaaaaaggaagacaagttcttgaagaactgcatcaagtatcttttgtaaacagcatgttgagctcattaccatatacatggtgccttttttgttgttactaatgtgatatggttaagctttgtgtccccacccaaatctcatcttgaactgtaatccccaggtattaaggtaggaatctgggagaggcgattggatcatgggggcactttcccccatgttgttctcatgatagtgacagagttctcgtgagatatgatggttttataagcttctggcatttcccctgcttgctcttctgtctcctgctgccacgtgaagaaggtgcttgcttccccttcaccctccaccatgattggaagtttcctgagacctccctagccatgcagaactctgagtcaattaaatctcctttatttataaattacccagtctggagtagtatctttatagcagtgtgaaaacggactaatacaaagtgcctatgaaaccatgtttatgtttttacagcttttattccatttgactccatcctaggagaatatctgcagcaatagtccactcattctctggtttcttgtacaactttctattatttttgtctgaatttatttattcagggaagatcgtcaaaaaaaggttgcatatttcttcttgggctgcaatggacaatcttagctcattcttacatgttataaaaccaattatctcaggctggatcatgcatcaatatagtcagtgttatcccacaacatgaagagctttatgaacatctatagttttttttgaaatgtccatgagagtttaccgctcactcgagtcaacagaagctttacatgaatctgtaaagtttgtttcctctattgtaatacattttttatgatctagagttggcatttttagagagtcctgaaactctctaggtattaagatgtttctcgtgcttacaaggagaatgccttaaaatgtgttctctgatcttttctattatttgggtctatagaaaagatactgtatacgttgcttctgaacatattttatatgtgttcagttagtcaataaacatgtattggatgatttcatgtgctaggtgtcctactaagtgtggagaatacaaagatgaagcaagcacagtttccaaaatcaaagaacagcacctgccttctagaaagaaaggcaaacaaaggaagagaaaattagagtatagagtgataaatattgtgttagaggtaggcacagagggactagcacagcaatacaaagaggaagcagatttcttaggcctggaggtgggaaattcagagcttgtcaggtgaaatgagggcagtgagcaggaagggcattccagccagagaagcagccagtgctcaggccagatgagagagctgtaagtagctcaatatgcttgtagcacagagtggtgagagatgaagccggagagataagcaagtgccaaatcatgatagaccttgcttcttcaattgtttgtttagttacagctcactttgttccagaagagtttttacgtgcattgaagggccgtgaataccacactaagacatttggagcccttcctaaactgttggcaagcctcaggaagaaagcaacatgatcagatttgcattttagaaggataattctatcttcttagaggagaatgaattgtaaggaacaaagacagaagcagagaggccatttaggaaattgctgcagtccttcagatgagaaatgcaccacgaggggctaaattaaagtagtagctttggggatggagagaaacaagagatatagaataagcacaatgaacatggcttgctaataaatattttctcagtgaatgagttgtgactaattagatgtatggggtgagaacaagaggtaattaaaaaatgaatttcaggtttagacttgggaaaccaggtgggtgacaagagaactcattgcttggatactgaatgcattccttctgagttctttttacacctgggaactgtaattgttgtgtgtggattaatcttaactgtgtggtaaatgccctaagcataagtactgtcttccttttctcgtattatttttctagcactgagaactttagagttacgttcattgaactaactataattcaatgaacctggcccaggtcgttatctatttaagaatgagtgacaggtcttaactcttaattcactagtattctttggttgtgtgcaaaagaaactgaccctgactaacatgaaccaaagaaaactgtggtgagttattgaggattctcagacttgatatatagtctggagaagtaggcttggaaataggcaagcagaaaagtacatgcagcaaactgatcaagaaccacagaaagtctcctgtaacatgaaggatccagtcaggaagccactgtggaaaaggagaaaccacaactttcaatctctttgtccctctgctcaagaatcaaattccagagagctctgaattattgcctatcttgaggaacattttcactgcctagcctacaagaggtttgggcccataattatagtcctgacagaagggaaggaggtaattcctcaaatatttagaaatcatggtgtacttaggaagagaaaaaggatgctagccagccaaataattacaaatgtctacttccagctgattttagcttttattattttctgtttagaaagattcttaaaaacaaaattgaagccttatgaagtatgggcatgcgatttattttctggctaaaaaacttggaactctttcaactaagctacattttcgacaaaaaattctattctgtagcttctaggaagtaaaatgaatatgtttttaaagagtaggacataggctctgaactaatgagatacaatcaaaaactttatacttggaaataaatattatttagttctgaaggaaaaaattgaataggtgggatgaggggaagaaaatatatgagtaaaaggaggaacacacacggaagaaaaatccagcattatttggataagcttctgagcaaaattcaaaccaaatctaactcttgaacatccggagggaacactcgccactaattacaggactaagatatacaagaagccacttcaggaccgtggggccaaatcagccatccgattgtagtttttaagatgtggctgtggttgtttgtttggtggtaggagaaagtttagatttgctttcactggctttggtggatgttgatatttctttcatctctaatctcattccagagctagggagatacctgtgccaactctggctttgtttgctctgccagacaatcctgatgctgcaaagtcaaatcatcgtgaaggaagtttgtgcaaatgtgggaaacaggactataatcctgcttgaagtttgcttagattcctgggaagtctccctattccaaccctttttgagaaagtaagtaaaagaactgcttttatgattgattgtaaaaactatggaagggtttaagttggtctctatttgaaaccacaattttggtgatatttctattttctttcatttctatttttttcctagataacaatctctctctctctctgtgtgtgtgttttcgaagaagagctcaaccttgagaaagtccacatttctgtgtaggataagatagagatgagacattagacaaaacgggtgaaaagtactttttgaaaaccgaatgagtattttctgtgcacaatctgattctgttattacaagtattagacatgttataggatgactttataaacctatacgattgatgtttacagcttaccttagaacttctcagtttttcttttcccaagctagacagataccctagaaaataaaataatgattatagtgcttttacttacatttattatgggaaggggtaattcctcaaattggaactaaaattggaaatcagatagcatagctgcttaaggagtaactaaactatttgaatttgtcacacagaaaaaagatctgacacattccttttgcttcaaaaatgtttttctgtccttactgctagaagaattgatacgctgtcaggaatattgaacacattaaatattggcttttgagttaggcaagaccacttctttaattctttccaaaaatgagtttctatgttattattgtggccagggatgtagccaaagatgtgagccaaactgcctgggcttgcatcctagctctcacctatggaatcagttgccattcataaattgcaaaaaatgcaaaaaaaacagtggtctttgcagagctatatctatatatactagttgataaagaaaaacctggaaattttattttattagttactctttcatttgatggttctgaagagagttataagagtgtgagtgcgtgtgtgtgtgcttacatatctatgtatacatataagtgcatgtatatatgtgtaagtggaaatatttatttactgtattttatgtatgtatcttgtgtgtgtgtatgtgtgtgacagactctcactctgctgctcaggctacagtgcagtggtgcgatcgtgtgtcacagcagccctgagggccccaggctcaggtcatcctcccaagtagcctctgcctcccaagtagctgagactgcaggtgtgtgccaccagacctggctaatttttgtattttttaaaaataaagatgacagttgtaataaattgagtgaatagtcataatattatcaagctatcctgagaggaaaatctcaggtgagtatcataatgttgctaccccaacccatttcacatggaatacagttatagcaggcttaaaccacttttgttttaactcctttgccaagcattgtcactttttgtagtagagttgagatgattaggtaggtagaacccaacagaacccaagactgatccttgtttacaatggaggtgagtgttgagatgctgccccataactgccatcaagactaactgctgatatggaatatggaatggcatgttagtgatgaatgcttagtaattcaatttttagaaagatttgttttagcatttccttagtcatctctaccttccttctagcctgtcatttgttcaaggtgatggagggtatgtgataacttggagaaattgtttgaactgaattaatcagactactattggcaataatattgtgtggctctttgagtgttttttagattatttcaggagatgtttgaaatgaaacttactggccctgaagccattttgagttacctaccaaattaagaaatggtattccctgagaaatggacataaaattgcactgcattcctagttatattttctgataaattttcatggaaagtaggtgtccttggattttataacagatgaataaattcccaactacaaaacgtcatttccagctttattccagtttccaatacgatgactgtgatggttaatattgactgtcaacttgattggattgaagtgcaaagtattattcctgggtgtgtctgtgagggtgttgccaaaggagataaacatttgagtcagtggacttggtgaggcagatccaccctcaatttgggtgggcaccatctaatcagctgccagtgtggctgaataaagcaggcaagagaagatggaagacaagacttgctgagtcttcagccttcatctttctctcaagctggatgcttcctgcattcgaaccagggactccaagttcttcagcttttggactcttggagttataccagtggtttgctaggggctctccagcctttgaccatagactgaaggctgcactgttggtttccctacttttgagtttttgggactcggactgattcaccactggcttccttggtccccaacttgcagacagcctatcatgggactttaccttgtgatcgtgtgagtcatttctctttaataaacaccctttcatgtatacatatattctattagttctgtccctctagagaaccctgactaatacaatgaccttgtatgatttttattctagggaaaggagagggagcagaaaaaggaattgtaataagtaaccatgagaaagttttaaaatcataccttctttttagcatttacagttcctgtgttgccatgtcctgatttggggaggaaaataccagtgatactacttggggtctgagaggtttacagtggatttttcactcggatatctatatctatctatctatatatacatatatatctcaaaactattcaggactctctaaattcttctcatggattcatcatcaattcatgccacagtgagaacttcattcatatatggcagcacatctggaaactgggtggcaaggtcagattgaagtcatggaacattccagggaggtcaaacattctaaatagaagcagcttaactcagaatgttcttcagtaagtgatgattgttttggcttctgcagtagcctcattgatgatctgccattaagaagctttcaacaagcaaatttttcaaaaacttgaccttctgaaaggagggtaagaatttcattaactgtaagcattagaccatgagcacattatgctttaaattcagaatgtttctcagaaagtctcacatcatcattattctttggttttagcatgactttgtccaatatagtagccattagccacatgtgactattgagcacttgaaatgaatgtaactagtgagactgaggaactgaatttttaatttttaaaaaattttactttattcaattaaaaaattgaatataacatatatcattcatatttttatattgatcatatgttaaaatagttgtattttgaatatattgagttaaataatgtgcattactattaataattttacctgttctttacacatttttgttaatgtgaccaccacaaaatttaaaattacatatgtggcttgtattatatttctattaggccagttctgccttttacttgttggagactcaaaggtgtctaatttacttagatacataatctgtcttccttttttcacctctagagtgatggtatataattgttttcattaattgatttaatagctggtttcagaagaaatgactctgattcttccatccaatcatctaattactctgagaatatcttgctttttctgagaacaaattcactattatcagatagtcgaggtcactattataatgctctgttatttctttttcccttagccccctttaattctcaaggctaacccatgcaacagtcatagcatgtcattaaaaaatatttttgttcatagttttgattcaataatacctccaggatgtcttaattatatctgctttagtccagctagtacattgcttcctccggatttctgatattcttgaccttaaacttcttgtctcatctcacatgctcttgttgatcttgatctaaattacttcccatgtcttttctcagaattctgctttctaagtaatatcctctcaattccacaccttgattgttggaacccagaatggtgcaaagctggatgcaaaggctattgtaggtgctggatacagctccataggaagacatggcttctgaccttatgtgacccacagtctagtgggggaaacacaaagtaaacatgtgtgtttcttttccaggatgctagaacctgcctttcctgtaagctcagagaggagaagtagctgggcatttatttctccctgggaacagcccttggctaataactgatacattaaggaatagaaatactccatcccctaatcaggacacctctaagctgagaacaacatggaatgcaaactgcctctggattattgagcctaagatacattctgctgggctatgcttgctatcacagccttccttggtctccttcctcttctggtcccaactccttcctcctttacttctgtcctgggaatacttcaaataagccactttacccctaaatcctcatttcagtatgatgcttctggggaatccaaccctatatcagtaattttaggtactgaaattggttctaggaagccaacttttaggatgagacttagaattaaatcactcaatgcccagatggcaacagagaagctgttgtttgtggtgagtgaagggatgatatcctctggcctgctgtagcattaaattgttgatatttttacctgtggtgagttgggatggaatacaagtgaaaagggatgcactggaccacacagcagctatgaaatttaatacttttgtaatttgatagtaattataagaaggatggggttgtttagtggctgctaattgatgtactgcagaaagaaaacactgtgctttggttagtcaattgccagttcatggggaagaaggagatcaagaattctgtttcacagatatttagtttgtatctgagggcgattttaaggagagttcatatatctgcagattgggtcaaaagcagaaaaataaattttcaaatcatccctctttacatggtatttaagacaatttgtattaataagagttaatactagcaaacaacactaaaagggatcatctcaagaagaaaagaatattgaatggatgttgggtcattcaaagaattgccaggatatctcagggaattgtcaggaacaaagagggctggcaagagccagaattgcaagaccacgataatggcacagattctctccaaagaggacactgctactgccatgatgcaactgagtatctcagcttatacaatctctacttctagctctgattcctggatgccaccatagataggcatctcagctactggtgccctggataatgagtgtagctgcagctgacattagaaagaattccctatggactgtgtttgttctatctcacaagctccaaatttgaagattggtggatttttgtgattagacaagccaaggccatgctgccttgtgtcccacataagacaccagtgcagcgtgtcctctttgaaactcaggataacgtttttgagattcagccaaactgttgcatgtatcatgcaaattcattattttctatttctgagtagtattccattgtgtagggacacaacagtttgtttatatcctagtatatccttgccttcattgagttctcaaagttttttttttttatagttctcttttagaagctgaatagctttagctttaacatttaggtttatgatccagtctgagaaaattttctgtatatttaatagtatgaaatattgaagtttttttccacatagatatccatttgcttcactactatttttgaaaaaacgatccttttcccattgtatttctgtagcacatttattgaaacataacactgtgccccgcaaatacatacaattattatatgtcagttaagaataaaattaaaatacaaaaataaaagaaaacgaccatatatatgtgtatatacttctaaagtttctattctgttccattgagtgatatgttgatacaattgacattatcacctttgtgatcactacagctttgtggtgagtcttaaattgcattagtacactacctccaacttttttctttaaaaaaatttttcttgcctattctaatcatttgaatttcaaaataaatatttgaatcagcttattagttagaaggaaaaagctctgctgaaattatgattagaatgatcaatacatcaacttgggaaaattgactttttaatattgtgttctaatgaacataatatatctcttcatttaatttttcataattcctctcagcaatgttttgtaatttttacaatagaagtcatgcattatttatatccatagctaaatattttatgctattgaaattatttttaaacatttcaatatgccattattagttgctaatatatagaattataattaatttttaaaatattgatcttctatcctatattcttacattattttaaatttatagcatattctgagtagatattttgtagcttctttaattttttttatgcttattatcatactgtcttccagtaaagaaagttttgttttattcccaatttgctaggagcatttatcatgattagttattgaatgttgtcaaatagttttttctccatttagtgagatagcatattatttctttctctcctctgttaatatcacaaattaccttgatttgctattcaactattaaccaaacttgaaatattgtgataagcccaaattggtcatgtggcactaaatttttgttttgctggattttacttgctaatctttggtaaagacttttgtgtttatgtttataaggtatattggtagttttcttttttttttattattatttatactttaagttttagggtacatgtgcacaatgtgcaggttagttacatgtgccatgctggtgcactgcacccactaactcatcatctagcattaggtatatctcccaatgctatccctccccattccccccaccccaccacagtccccagagtgtgatattccccttcctgtgtccatgtattctcattgttcaattcccacctacgagtgagaacatgcggtgtttggttttttgttcctgcaatagtttactgagaatgatgatttccaatttcatccatgtccctacaaaggacgtgaactcatcattttttatggctgcatagtattccatggtgtatatgtgccacattttcttaatccagtctatcattgttggacatttgggttggttccaagtctttgctattgtgaataatgccgcaataaacatacgtgtgcatgtgtctttatagcagcatgatttatagtcctttgggtatatacccagtaatgggatggctgggtcaaatggtatttctggttctagatccctgaggaatcgccacactgacttccacaatggttgaactagtttacagccccaccaacagtgtaaaagtgttcctatttgtccacatactctccagcacctgttgtttcctgactttttaatgattgccattctaactggtgtgagatggtatctcattgtggctttgatttgcatttctctgatggccagtgatggtgagcattttttcatgtgttttttggttgcataaatgtcttcttttgagaagtgtctgttcatgtccttcgcccactttttgatggggttgtttttttcttgtaaatttgtttgagttcattgtagattctggatattagccctttgtcagatgagtaggttgtgaaaattttctcccattttatgggttgcctgttcactctgatggtagtttcttttgctgtgcagaagctctttagtttaattagatcccatttgtccattttggcttttgttgccattgcttttggtgttttagacatgaagtctttgcccatgcctatgtcctgaatggtaatgcctagggagactttaacaccccactgccaacattatacagatcaatgagacagaaagttaacaaggatacccaggaattgaactcatctctgcacgaagcggacctaatagacatctgcagatctctccaccccaaatcaacagaatatacatttttttccgcaccacacgactcctattccaaaattgaccacatagttggaagtaaagctctcctcagcaaatgtaaaagaacagaaattataacaaactatctctcagaccacagtgcaatcaaactagaactcaggattaagaaactcactcaaaaccactctactacatggaaactgaacaacctgctcctgaatgactgctgggtacataatgaaatgaaggcagaaataaagatattctttggaaccaacgagaacaaagacacaacataccagaatctctgggacacattcaaagtagtgtgtagagggaaatttatagcactaaatgcccacaagagaaagcaggaaagatccaaaattgacaccctaacatcacaattaaaagaactagaaaagcaagagcaaactcattcaaaaactagcagaaggcaagaaataactaaaatcagagcagaactgaaggaaatagagacacaaaaaacccttcaaaaaattaatgaatccaggagctggttttttgaaaggatcaacaaaattgatagaccgctagcaagactaataaagaaaaaaagagagaagaatcaactagacgcaataaaaaatgataaaggggatatcaccaccgatcccacagaaatacaaactaccatcagagattactacaaacaccgctatgcaaataaactagaaaatctagaagaaatggatgaattcctcgacacatacactctcccaagactaaaccaggaagaagttgaatctctgaatagaccaataacaggatctgaaattgtggcaataatcaatagcttactaaccaaaaagagtccaggaccagatggtagttttcttgtaatctgtctttctgcttttggtatttcagcaaagccagtctcataaaatgaattggaaattattcccccctctaattctaattaacgagttcatgtaaaactattgttttctttcttcaatgtttaatagaattcagcagtgaaagacattctgcctacccaatgcttcttttttttactagtattcaataatatgattaaaatatggcttctgtggttttctttgtctttatcctctttgttgagtttctcagaactgcagatttatagttgtattagtccattttcacattgctaaaaggaaatacatgagaccgggtaatttacaaaggaaagaggtttaattgactcacagtcgggcctgagcaggcccaaggaaacttacaatcatggtggaaggctaaggggaggcaggcactttcttcacaagatggctggagaaagaagcgctgaattgaagggggaagaatcccttataaaaccatcagacctcgtgagaactcactgtcacaagaacagcatgggggaaactacccccatgattcaattacctccatgtggtctctcacttgacacatggggattatggggattacaattcaagatgaaatttgggtggggacagaaagtctaaccatatcaatagttttcatcaaagttggagaaaatttgactattattgctttaatctgacctttcctcctctttttctggaagtccagttgtcccacaggtaagtgagactgtatttatttttcaagattttttcctttcagtatttttgtttgcatactttcgttgctatgtcttcaagttcattggtcttttattatatggtctgttatctactacaaagtccatccatttaattttttctcccagatattatgcttgtcaactctatgaagtacatttgttttcccaagtcttccactgctctagtaccttgttttcttttaaatccttaagactatgtataatgttttaatgtacttgtctgctacttccatcatctctaatttgtttggttctatcacgtttctcatgattatgagtcataaattcctgcttcatgttcagtagtttttatatgatattggacattgtgaaattatggtgataagtgtgtggatcttgctgtcttcatgtaaagagtgttgaagtatattttggcagaaaatttaatcatttgtgcattattttgaactttatctctcatctttttaagggtggcatatagtagccctactatgaagtaccctctgcattttcttttaaatgcctcagacattcaacaaagtatccccttttggcttgatcagtgtgaagttgtctcccattcctgtatgatcttcgggaatcattcagcttacagctgcgcagtagcttttcatttttgtacaggctcatggagttttaccctattcattacttagttttacctcatgcatatattgcttagtgttcaaccaagctatcaaggggatccatgcagatttctagagctatttactctttcttgcaagttcagctgcttcagcctttctgaactctaattgctgttccatcaactaggtgagactgtcatgcttggtttgggctccccttatctgctctgaaattaagaaaggtgtttccaggaagaaagtgcagtgattatatagttcacctcttttgtttcccttttttaaagcaatgcagtcctgtacttccagctgtccaatgcctgaaaatagctgttttacatattttgtcagttttctagttgtttttagtgggaaagcaagttcaatttctgtgattgtgtcataagctgaaatagctgttctttcttaacttttaaacctctatcttgaaatttaaaactgtgtcaaaataataattggtaatatactttcaaaatccaaatggtcatcaaatatgctggtcttaagtgaaattagcaatctagcattttattttgggaatgcctagatacctctgactgtcaaaataataatatggcttcaatttttgatagtgacatcaaaaaataaaaccttttaccaaataaatcccccaaatcagaatagcaaagtcttttgtattcctcaaatcagtcaaaggtgttttgttttaatttttcatttatagtttcagagaaaaatttatattctttagaatatatttgtagtagttggtgttctcatttctttttcttattttacatactagaatcatactcttggatcaaattcaaaagcaaatatacaaaaagacaggataaaaatcgaccatcagccaaaaaaaaacccagtatttaatctaaactcctttgctcttttttcttgaattattttgccatacaagtaaatgaacacaaaagagacaatcaagtattccctggctgataatgtataaagatgaatttcaacacttctctttggaagctttaagtaatgttcagtcctgaaacaggactttaaagggatccattttcattcacagtcacatagatagagtcaatgctttaactttggtcacaatctcattttggtccctttgtctgatctctcattccttaagttgtgtctgctcctgctctaaatcagaccacatatcacaaaggcagcacagggatttgtgggtggaacaatcccaagtttcctactgaagactagcagtactgtgtgctcactgagtctctgaagctcagagaggtattagttttagtgtttgcggtgggaagggcagggacaggagaggttgggcatggtaccatgctcgctatggtaaggcatagagaagtgtcacatggaaatgtgaagtgttgtgaggacatcaatgtgaacttggtctttttgaaccaatagatgaacaggtgctgttgacagcgttggcaagtaatttgacttctggttatgaattattgatctcgtcccataaaaatgcaatggggcaggtgaccacacatttttaaattacttttggcatcatcagcttctggtcatctctttatgtaagtgttttcatttttaaattagatttggcatcatcagcttctggccatctctttgtgtaagcgttttatcctacaggtaaataaactgactccagctgtcttgcgtgtcaactcttccaacaagcctgacacttagctatgatttggctgcatacaaaccaagcactgtctccaaccaacacttattttggcttctatttcctaggtccatggtatacatgaaaatttctcacgtgattttaatatagttttatccgatagagcaaacattgaatcagcatctatgttgagttagtcagacaaagtatgatgccgtatttgaatgcatttataaaaataacactactatcttaggtataagaaaggattatcatttttctggggatttgaggttttaaaagtgtgtatcttgagtgactgataacattttgttagcattatctgaggtcggggcatacactgtgatcatcttctcaagtctcctaagattcttgagactaaatttagtgaagtgaacaataaatggttataggctaagctatgatgtgaaactgatttagtggatgaagatatgaccagttttcaaggtgtttatgctttaaacacattttttctgtttggttgatgttttccccctcattttcctattgctagtcagttattcatcttagttcaaagctagcactttagtacttttggaaaaggacatagagaataaaggaatggttaccagaggctgggaagggtactagggggttgagggggaggtggggatggatcatgcgtacaaaaaaaaagggagaaaagatgaataagacctactctttgatagcataatagggtgactatagccaataataatttaattgtatatttttaaataaataatgtaattggattgtttggaactcaaaggataaacgcttgaggggatggataccccattctccatgatgtgcttatttcacattgcatgcttgtatcaagacatctcatgtaccccataaatatatacacctactgtgtgcccacaagaatttttttaaaaatacaaacaattaaaaaaatacacagaaattcagaaaattaaaatgaaaggatatactgtggggccaaaaactaaagcagtgactataagtgaggccgaagggcttctcagaagcaagaaagtctagatcccatttgctttgatgttttgggtaaggctttgtcattgtttgcttcttgactcagctagataggtctagttagtatttaaattccaacttccaaatcacaaagtgatctcacattcactttgtgacttttaacgcttacattagtaataggcttatcaacattttgatgccagtagaggggaccaataattattgagatctaacggaaataaaataaaggtttaacttatttagttgattctctcagatgttcatatttagcctagggaaaatatatttgctaagtttttgttataggagccacaggaataaacatttattctctctcccaaagttttcttctcacattctttctgttttactcagtgactctctgtctccctctatttttattcatgacttgattttgttggtatattcagttcgtcattcattcattaaatgtgagtggaagtgaagttccattagaagtttagcacaaacatgactggtttatttcagggtaagcccatcaaccaaaggtggaaaaaattccaaaaaaattctatttgctggaaaatttgctaacaaacttggatactcaaaagacttgctcacaatgtgggatttgagggtgggggcccgggtggagaaaatgcaaaatataataaacacaacagacattcactggcataaaactgattggagtgctttaggaaaacaagttacgagagaactatgaaaacagctttgtactttgtgaagtggaacattttagagatgcagattataaagattggaactaatagcaaagccccaaaatgaggtttttgttttgggtctgcacatgcacaatttattcttcattcaaaaagaaattttagtttgcaaacaggatgtataccagaccccttaacaatctaagtatttcatctacacagaggattagtataaacacttgcccttttatagtgaaaaaaggttaagctaaaatgaaacaaattgcatttagcttatctttttaaaattagaagaaaaaatataaatgaagcattaggttttttattaaaaacatattttagaatgtttctttttcaggtatatttattttcttctttcatttgttgacttcaccgtgaacttaaataagttcttggcatgttcttggtttatttgacttttgacttaacaaggcaaggtatgaatttgagtctctaaatttggaagaagttctttgaagtgaggccctcttagcttcctggaggaagcgacaattaaatttgcccttagggaaaggacacaatttcagtaacaaaaggatggggtagagtactcatacagaggggatgggcccctagaatgcaaggatgtgggggacagccaagtcatgtcaggtggttgagagtaacctcagggtgcaggacataggcaaagtggaaggtaaagcaggaaagttaggcttgcccacaccctatcatgtcaggattcagaggtttattttaataattggcacctggtagcctttaacagctttaagtagagttccatgaaaaagagtggataagaaagaaagaatcactgaaaaaaagagaccaaatatttatggagctattcctctgtgctacatattatatagttatgctatatcccctatcatgcagatggggaaactaaagctcagatgtgtttaaaaacttgctaagatttatagattgataattttgattcacatttattgattgaacaaaacttaagcttcaagaggattcaggattcaagagaggattcaacagaggcttcaagatgggagatctggccttaggcataagagactgggagtggggatactagatagatgtgagccactagcctgcatccagatgaaactcataaactgtatctaatgttccagaacatagggcaaacaccagaatttttagttttattattttttttttctggttataaaagtatataggaggccgagcatggtggctcatgcctgcaatcccagcactttgggaggctgaggcaggtggattacctgaggtcaggagtttgagaccaacctgaccaacatggttaaaccccgtctctactaaaaatacaaaaattagtcaggcatggtggcaggcagatgtaatcccagctactcaggaggctgaggcaggagaatcgtttgaacctgggaggcagaggttgcagtgagccgaggttgcaccactgcactccagcctgggtgacagaatgagactctgtctcaaaaaaaaaaaaaaaaaagtatatatatatgatttctgagttagaatactaggcatgcttaatagtatacctcgtctgaacttccttttaaaattcccataataatacacagatagtggcagcagcactataaattaaatacaagaggcgaacaagggcagaattttctctaatttcatctctggtgtgacagatttgaaaagcatattcttgggttccacattctaggttccaatctctgagcttggacaagaaagaagccaccaagctggggcctgggggtggagcgaggtggctcacgcctgtaatcccagctctttgggaggccgaggttgatggatggcctgagctcagcggtttgagaccagcctgggcaatatgttgaaatcctctctccaccaaaaacacaaaaaattagccaggcaaggtgatgcacctccttttggcttttagatcaagactagaaaactcccctaaatgaagtgaaacttgatggaggctagctcctctctttattgcaaaaatcatcgtctggattgacaatttttttcctctcaaagatgagcaactaaacaccaaaccaaagcatatagtctatgaaaaaaattctagaacaaggaatgagaacattgtcataaagatgtacagaaataatttgtttcactgcttcactttggaaatctcctgaggagaaaaagaaaaaaaaacaaaacaaaatgcctgtgcctcaacccagagcttctgatttagttggtctggagtgaggcctggatgttgttttttgtttgtttgtttgtttttaatagatttgttttttagagcatttacagcttcatagcaaaattgaaaggaaggtagagagacttcccatatacacccttctcccacatatgcacagcctcccttgttcccagcatctcccaccagaatggtacatttgttacaattgatgaacctacattgacacattattatcaccctaagtccatgcgttagggctcactcttggtgttgtacattctatgagtttggacaaatgtataatgacatgtatccaccattatagtatcatacagagcagtttcactgcctaatatggtttggttctctgtccccacccaaatttcatcttgtagctcccataattcccatgtgttgtgcgagggacccggtaggagatgatggaattctgagggtgggtcttaccattgctgttcttgtgatggtgaatgggtctcacaagatttgatggttttaaaaatgggagttgccctgcacatgctctctttgcctcccgccatccacgtaagatgtgacttgcccctccttgcctaccaccatgattgtgaggtctccccagccatgtggaactgtgagtccaattaaacctgttttttttttgtaaattgccgagtctcaggtatgtttttatgagcagcatgacaacagactaatacactgccctgaaaatctcctttgctctgcatatttatccctccctatgcccaaaccctggcaactagtaatctttttactgtctccatagttttgccctttacagaatgtcaaacatttggaatcacaaagtatgcaggctttccatattggcttctttcacttagtatcatgcatttcagtttttgctatgccttttcatggttttatagctcatagctcatttattttagcacttgataatatcccaatgtctggatgtaccacagcttatttattcattcacctgctgaaggacatcttcgttgtttccaggttttagcaattatgaataaagctgctataaacatctttgtgtggacagaagtttcagtctttctgggtaaatatcaaaaagtacaattgctggattaaatggtaatagtatatttagttttgtaggaatctgtcaaaatgtcttccaaagtgcctgtattatttttcattcttaccagcaatgaatgagcgttcctgttgctccacaggtatttttaaaaagtgccacaggtgactttaatgcagccaagtttcagaagccactgacttagggcaagaacatctgtcagcaaacatcttctctcacttagtattagtttccttatctggtagaagagaagccttccataagacaatagatcattgcttctttctgactttcttgaacatgctgttactttaatgtttttattataaaatccttcaaggaaatacatgtccatgccaaaatatgagacccaattggcaaatggaataagccagaattaccaaggatctaagattacttctttgtgctttttaaattttaaaatatattgtcatctaagatacattgactacagaatgatagagaacagtaccaacaaagccaagatcttgaactggtgccaatgcataggaaagcttattgggctctgttcatggccacagacctctaacctgatgaaggcctcacattaccgacaaaaaaagaagaaaaggtatgttcctagactactttctcctaaactcctggcccttaggtgcttgctttatctttaaaaggaagggagtggatgatacgatttttaagcttccttaattctctaatctatgcattacattatttttcttcagtaacagaatttcattagcattgacgacaagttaaaaagcatgttctactaacttttcatcagctacgttaggtgtaataaatattcttatactgggtctatgataagataagtgaaagacttgcttccagcaccaaatttgagcagggcggaggtttggtagactttgttatcaagaaaaattatactttagtgttacagttttaaaaatttaaattactgcacaacaatccacgatggataaatcatcaacagttctaaatagagacagattgcatttttaaattaaatgttttgtattataaattaatatctacaatgtttgttctagctaatattaaaatccatattcatgtaatcattcatacaacaaacttgtagtgattacaaatataaggatgtttaaaacatgactttgccctctcaagacttataatgttatgtggggtagtgacgttgtcagggtaaggaagaaacagacttctgcaatttatttaaagtcaaggcaaaaatagaaaagtataataatatagatacccataatatcgacatttagaagccatagtaattggtttttactggaaatgagtgtgtttgtgcgtatgtgtgtgtgtatgtgtgtagtagaatagtagcagcagaattgggccatctgcttgacaaattagaccttttaactgcatagagctttgttaggaaagatgattgaaagacaacctggctgaagaattatatggcaaagacccagagacatgagcatttagaggaaatctggcctttgtgtcagaatcatcagtgtgtttgatcaggtatagcagttgcacatgtggctagaaaagttggttggaatttagataagtacctgtcatctgctagattccagaggaaggcatgcactatggggtcaaacactgagctgcaaatattctttaaagtgtggaatcctcacaagtgagaatccactgtatttctaaatacaatagtgttttggaattttgttgctttgacctagtaatgttagctgagaagatttagttaaacatccaggaaaacacgctgcctccaaagtttagctttgaactgagaaaaggaattattcactgcttcatctatatcatatgcacagtgaatcaaaaccaatataatttgtttttagtgactacctttcattttggtggcttgagtactttaacatactagtctctgtgtatatcaggctttgaattgagtcaagattgacaattatgattgagaatcatttccatgagagaaaagcaagcacatcaaagtgcaatcatttttcaaatcgtacacttgattctggagatgtagttagtgtctttggccttgacttgaaagctgtggtgttgagtcctttaggaggtggaaggtaatgggtttagacagcagaaataaacaagaacttcaggaatcctggtttgacatgatggaatccagtggcaagtacactgtatatatctaaaaatgaataacaacctcatgaaaatgtaagtagaacttcatagtgctttctaccctgatcttacctgatcttagccatagtgcttgtagccttctctttctttctctccttcccccttctcttccactcttcctcttcctccctcccttctcctcttcctcttcttattcttcctcctcctcctcctttctctctatttgtctctcatttcttgacctctaagatattgtttattgtggttcctttttggtattgaccaaatttctggctattgtgttactggtgacttcttttctaaattaggaaattgtgtttggaaaaacagaaagaaaaatactccccttgctccccaaatttttgtttctttcgtcaattagaataacattagggccaagtttaatggccctaatgttaaatagccaagtttaagaatgtatattttggcataaatcttcatgtacaagcttttaaataactcttactctcaagcaaaagtttaagaatttttaaacaaaaagattattaaacaaaaaaccaatatctatgctaagaaatgcacattggaaactgaattaggattgtctgttgtagtatcatgtttttgtacttcctagaattccctaaaaactagaacatggtcatttacagagtttattatttaaaaatacacgctatttgcacctaaaataagatattatttaaaaatgccattgaggaaacaaaactttcattcttctcaactcttttcatttggctatatggaaaacattccatttaactcattcagaaaatgtgcaaaactggctttaggtacaacactaattttctaaaatgcatgggccagggccgttttccatagatttcttgcaatcagttgcatatggctggaagtagaactaacggtgatttacagtaattgcctgtcatcagtctatgccatgttcacctgcataatccatcaattgtcccaacagtgcccacagctcataacctacctgaggttatttgggtctcaggaaacacacagcatgtgccaatgttccaagaatgaagctctggttcccagcttctgctgctccaacttctatagcagcaaggagaaaagagtaacagacatactgatcacatctaattagaaggtaagaagtattcccttgagcatgtttatgacacaggcacaataggacaggagtagtctattcaagcgggttcctcaatctcaggactactgacattctggagagaaacattctttgtgtcgggggatgggggctgttctgtgcatttcaaaagcttctttggattctttccactagatgtcaatagcatccctcccaccactgtggcaatccacaacatctccaaacatcactaatatcccacagggagaaaatttttccggatttagaaccactgtactaagggaaaattaaaactagaaatttgtaattggtcagcattatatactgaatgcatgaagtataagtagtctacatagtgaaaaaataataggacaaatattcgtaaaactaacttaaagtgatgtgtataaacacaaagcatacattgaccttttggaaaacttttcatgggtgaaagggagtggtaaaagtaaacctctacagttatgacccttctgaagcaactgtgtttggaagaaaaaatgaaatgtgagaatggtagaaacttttttctacactggttcttactttgaccaactcattggttttcattgtacccttcggcttatgtaaaataattataacttttcttttccatgatagcctttcaactatttgaaagcacatgctgttttgttctgaagtccattttccaaactttattttgttatacaaaataggacatagttttagatcctccatctttctaacctttctctaagcagagcttcaatctgtttatattattattaagattcccaaggttgagaatcctaattcccatgagaaactgaatcagttagaaatgcttttgtctccaaaattcagaatatcctgcagtgatttaatcctttaacaaaaaaagttcttacataacaaaaattccagggatggttaattgttgatatttgttcaactgctcaaagacctagtctctagctgagcagatgttattatggagcaaaaaaagcaggtggaatggaagttagcagtgtcagaatctgcaacataccttatcaatgcagactaggaagagcatcaccatttataactgtattaatgcactttaagagcttgttgcttctctgggtattgtattacatgattgatactgtatctacctgtatcatagaagcaattccactgcaatgtaatttcctatatatgcaccccgttggcttttgcttgttgaatattgaaaccgagtcttatttgtgatcacatccctgtattattctgggtcatattacatatgtgctcaagaattgtttaaaggatcaatgaatactaaatatgttctaattttaggagcaaaattttcacttgtgagaaattacttcttagaaaatttccatttacagcacatttgtttttgtttatgttacattggattttcttatttagcttctggaggtatataaattatctcaaatttgtacataatattttgtgtgcatgctcatttattaagtaaactacagctttaataagtttcttaaagaagcatttggttccctgcatcagatgttaagttcctatacaatacagattttttggaagaggataaatgaaagatcaaagttaaaggacttcgagagaacatttattttcaagaaaatgtgacagccagctggggcctattttagagagatttctgtgtcctcctatgaccccaaagtaaaaaaaaaaaaaaaaaaatctacaacgacaattccggattttatgtctaattctgtcactgagctcacataatggggagcagtcaatgcaaaaattttggaaatggcttaggagtctgattctaatggattggaaaaataacaataatgtgctccagaaacactcaatcaatattaaaatagtttcattctttcagtatgaggagggtgcaacatacaatctgtcctttctgtagtttcctgacccatttttagcggtaggtgccttttaaagtctgtgttgatgaatttatataattgatccataatctctgatcagccccataggagcaatggcagaggaacacgcaggacttaggagtgagctgtatcacttgaatggagctggaacttaattgtagcttcattaaatagatccaaactaaggctagctacattttctaagtatcacatttcccaagtcttcattttcctcattagaggggtttcagttgctcacaaaagactcagcagatgcctgaacaattcattatactcttgtacacatctggcttaatcaattttgtaaaatgaagatgtcttgtccaactttacatgtagaacagataaaaactttctttcctactggaaaatatatttggggcctgcttacatcctgattcacagaatggtccccttacttcctgtctaccttatatctgaatacctctggttcacagagtaacaacacctttcagaaatgttgaaatttttttttcagggtaaggcatttagattgggagacaaacaaacaaacaagcaaaagaatcaattcatcctccccaccctcaccaaggaagcttccccagtcagagcactaagttaattacaatactgagacttcttatctgcagtttgcttatcttatacttgatcgcttctcagccttttggctaagagcaagtgtagtattttatacttgaatggatacaaagggtagtaatctcctcctcactgataactattatgcctttgtaattctaaatattgtttctgaaataagagcctcattttttctgcatgtaggaaagacatgttaacaatgaaaaatttactttaaaaggttggtaaccaaagtataaagtggcatattttataatttttccatttctcgaagaatcaaggtagtatctttgagtgttgttgattcacgcgttgtgaaatttttaattagttgtgttacaaaggaatattctggcacttccaaggcttgagcataaaacatcttagagattctacttggttttctggaaaaacctattcttagaacccttagccactttgtaagaagagtgaataccctgttgaagaggccacacagaaaggccttgcgaatacctggagagggaggggaacccagctgagactgattatctagctgtcccatccaagacatgaggcatgtgattaaacctgtcttggaccttccagttaagtccagttggtgtgtggagcagaagtatcacccagctgagagccctgactcacaaaatcataatattcaataaagtgttgctttaaaccactccattttgggaaattaagtaataacagcaatatataaccaaaacacgtttgtcaaatctttgacccatttgattaaaaccgttacacatgtattgattgccaacaaagaatttttagctgcatttggaaaacatttttccaggcaataaatctccatatccatcaatttcctgcccctgttttctgccttgtgtttgcttgtttttatcactgtgactacagattgctactctacatcacatttttaaccaatcctgtcctggagtcagtgtgtatatatgcagcccttgttaacagctcaagtgacttgatagcaaaattagattagcgatggtcttgttccaagattttgtgcctgatctggtaactctgagtttgagtttttcttgtttccaccttgtcctgtaaccgtgatagtgacaggaggctaccaaatgcctaggctgatggggcaggtcccatccaaagacagtttaaagcctgaaagccaagctacaatttaaattttcacaccggattaagaacttgtcttcccgcttggcatgctttcctctgactgatcaccacccttagcctattttacatatacctaccctttcctaattgtttttctacactgtcgtgcccacctttgagtggtgtttttgcttcaaacttttttgcatactcacaaaccaatcagcatgcactccccattttgagtccataaaagctccaggctcactcatattgggggactttcctgcttttaggtaggggaagcaccccccgcccttctttctctttgctgagagctttcctttcatttaatacattctactccactcactctctggtgtctgtgtgcctaattcttcctggtcatgagacaagaacccgtacctagctgagctaaggagcagaaaaaaatcctgcatcaaccccaataactggattgtaatcttgttcattctgcttataggcctaacatggtagcctttctaataatccactctagattgagattattccttgttttcgtgtgtacattcattttctattactaccataacaaatgccaatcattcagcatctttaccaaacctatttataatatcacagttcatagatatctaagctcagcagagctcagctgggcctctgctctgggtttacaaggctggaaccaaggtatcagcagtgctgcattcctttctagaagatctaaggatgaatccgattccaacaaactccttcatgttttagctagaattcatttgttttgaagttgtagaactgaggttctcatttccctgctggctgtcccattggccaggtgtcattctcagctttctagacactgcctgaatccttttgatccctttcttcatcttcctagccagcagtggagcatggactccttctcatgcttggagttcctctaacttccccttctgcctttctcttctgcttttaagagttcatgtgattaaactgggctctcaaattaatccagactaatcttcctattttaaggtttgttggttataaacattaattccatatccacagtattttcacagcagtacctcaatttgtgtttgattgaatgaccaagagacaggaactatgggggcacatctttagaatcctgtcttccactttggtgtcataccaggaactgaagatctgtctttgaatcaagtaaccaggttcttgctactacccatctaccatggctcctctacttcttgggcctaaacttggcttgatttttttctaaaattttttttttaaacagcattacttgttaaaaatatttatatacccacattttgccattttgcagagacatcatcaaccatttcctgaaccctttaataattattatttgactgggttgccatcaatttattgattcagtcatttattcaacaagtacttattgaatgccaggtaccttcttaggagctggtaatacagcaatgatacaaaataaagagtatggtctcaaagtatgtacatttctacatctggttatatgatagggataacagacttatacaaacgaggatatggtgaaatttcaggaatttacaagtgacatgaacaaaaatgaaggagaaatgtgtctatttaatttagggtggtcaggaatggactctctgagggataacatttaagtacagacttgaaggaagccaggaagccagtgtatatctggagaagagcgttttaggcaaaagattctggaaaaggtttaaacttgatgccgtaaagagtagcagagaggcaaagtagctggggagtgaaccaaggggtaagaaaaggagggaaaatcagacaggtcggtggtatcagatcctgtgcggccttgaagcctgtggaaagaagattgtttcctactttcagtgagttagtaaggtgttggagaatatttggcagaggatttaaatgatctcacttaaagcttttcattattagtctagctgctgaaggcagcaagaagtcccataaagaggcatttgctgttgttcaggatagaaaagattaaaggattctactcaagtggtagcagtgtaggagctatgaactggctggtcttaacataatcttaaaaaaagagacatctattgcttgttctcatatactaatattctgtctgacactcttatagctggtcatagtcaggcacttcctttgagtgttcaaagcaacatctttgaacagagggatggtaaaggagcttgacagtaaagaaacaatctaggtggaatctttacaatgtctagtaggtagcagacatatttggaagatgaagaggttaatgcttctcaaagttttgtagataaaatactctttttaaaatctaaaactggctcagccactatttttggaagcagtctacttataagtgattaagaaatattttcccatgctttccaagatttagatgcttcttatagtaaataacaacaataaaaagcccataattccaattgaaagcaaatcccaaaggaggcttagtagggagacaaagcattggaggtagctagaagtagaaggagaaatctatattacagaaaatcttatgaatgtacattggagtgaggtcttgggctaggtactgccccagatggttaatcattctggcatcgtgtctccttatgtgacagacatggataggaactagaaaaagcagggctattctactatactccctcacctgtatctacataatgacatataatcatttattttgtgggaatttaatttaacagaatttaattgaacagataaaacactcaataatatatcagaaaagacccaacagaatctgagaaatagagatgatttggacttcacaaacatctagagttccatttctaagcatcccctttgttcattctactcctaatccaaaagctatccccattaccacttttatgcctttgaccttgtctgacccaactcatttccagctgtgaaggagtttgtaaggtaaaataccaaactcttttttgaaaaactcttaccagcaatttcttagttttctacatcaaattatctctcctctttccttaaacaacaatcttctgtgctaccttcagctcctggctctatccttactgcttgcctaattcttcatagtttccttaacattttcattggaattttaggaatgttcttgcttttactcagggggcctacacattaggcgtaaacacttccctccatttctctaatctcccagtcaatccttcaaccaccctgcaatctctcgctcagattcacttttgcaccaacctaatagctaataattaatggctatcatattgtgactgttatctgtaacatggaatcttaataccagtatcacaagagccaaagggcatggagagaaatttgtggtagaaagtttgtggggtgattaccacagggcctaactcaatgagatgttgaacaaatcttagctatattttgatagctagtgtgtatgtatatattataccatctttttaaaaatatagatgttttaaatcatttctttaaaagcatacatcctcctaaggagaaaatttaaagtaccgccattctacaatactgtttgatagggaaattcagcatttgaaatgtacgctaaaaagtaatgattccaggtttaaaaagaattaatgctcctaggaagcttaatgttataaatgttataaaatagacttttgctagtcaatttcaggttgtttttttttttttaatttctatgcttgcattattatctcaactctttaactttgtatctggactaagtttagacataaaaattaaaaatgaagcagtagattatgttgcttgctgtttctaatttaacaccagaattttaatagtatgcaatcttcaagggttggtagtctggtaaaaacttgaagcaatagtttcatagaactttaactaagataaagtattaattgtctatgccaaagagggtgagcaatgatagagattataaagagcctagggcttccctgagacccaccttggtgctaccactgttaagagaaaattaaaaataaatgaacaatagtttccaactctaaaacatattatatgcagtacatactttaacctagtttacaatttatatttattatgcccactgaacccacaaaagcagtgtttaattttacagtttaaagtcacacatagggaaatgctttacaaaataggatattgttcctcaatgaaaatattacagtataggtcccaaacggctcagttcaagtcttttacctgaataacagagctgttgtggaatgcaggctacaagacacagtaatgctttaaatagttgattaagatttgaaggttgccaaagctgagagacattttaaacaagacccgtcttagttttccaagatttttggtttttcaactgcattatataccattgcttctggaaaattgagggtaataagcagcgtacattttacatcttatatacagtatgtaaatcttcaatgattttctctaccatcaaagcaagtttcaaggtttaaaaatctgttatacctacttaggtttattacttgactttactcacagactctaatatagaaaccaaatatttatgcaattgcttctatcaaatgcaacatatttcttcagtctatttagttatctgcaaagtctatttacaaagcatatgtatgatttcctctgactaataggtcatacaaatacgtaagtagtgtttttcaactcgtaattgtagcaagatgagccatcaaggtttacgttgtgcctgagtgtataatgcaaaaatagcatccagagattatatatttcttaatcaaaagtctagctttacaaagtcacatacagtatgttcttctattgtaaatatactctcagtataggtagacgtgtttctaatatattgtgagttgttaaagaaaaggctgagatatagtcaccaagtgtttaccaataacataaattattgcaaagcttgaaaaaaaatcaggccaaatatacacgacagtttgaatggaatgctgaggacttagtgaatgctgaaatatgactcatctaaaagtctgctactccggcctgatgctcctcaaattttaatgaccccttaaatgtcctcagatgcacatgcagtttacgtcactgaccactgttggtcaaaacaatcattggatgtgcttatttttcaaattttgagtatcaagttgtgccctaccgtgacacaaagcttagaggtctttcttgcaaactgtaaaatcatgtagaaaaatagtaactcaaaaataccacatttgacagtcggtcacgaaagatgttagcacctcaataaaaattagaattgttcattgggtgtgccaaaggaaagtggaaaaaaattaaaaagcatgccctgttttttatttgttttttttttttttcctacaaatcacagttttcctcacagtgttagacttttaggtcactctgatgtagcagtaccttacaggatgaggggccactgctcgttttttccatttgacctttacagtccacatggtccagttagttgaagccacaaaataaagaccagagacagcaaaattattgctaatgtgcaactatattagtagaatgcaattaactgggctaactaatgtgtatgttaatgtcttttttttttcaaaaccaacatcatctaacaacatattcttttagtttttccataaaacctgcattgagaatgatatcatagccccaggcaggcatttaccagactgaatgttttgctgatctgaacactacctgtattccaattttttggctaatgcatggttttgtatttcaatatgttctcatacattaaataaatgaaacacaattatacattatagagtttatatgcatcatgatgatataatttgagaaattatctctatagattatgctaacaaaggattcttaggaagatttttcaatgtactagccagttaagttgatctatctgtttgataacctaaaactatagattgttggcaaatgagaaaaataatagggaaaacatacaagttccttttctgtgtgtctaaatgatacattgtcttgaatttggttctattaaagctttaaatgaccatttctgtacacatggctatttcatttatttagtagttttgaaatgttagcaaatataaggtatttgtaaagcatctttcattataaagagattagtaatattcaccaatcatgccaatgagattatacactctgccaaagactactagaaaaatttgatcattattaaattcaatgttatttgacagtgtgaactctatgtaacagcacaaattctggactttgaatctggctgctgtcctcacctgaaccattaaaatgaccttgttaacaaggaaggaatcaatggggaaatatcacaaccagagattggctgtgtgtccaagggtgctttgtcttgttgccaggatcagactgtgaaatcacagaggcaagctgatgtcatcagaggtgactctgcctatttcaagtcctataatcaccccatgggattcaacagcagtaggaaaacatcacattctcttaatggacaccccatatttgtagaaacagttatgactattagcatttgttatacaaacccaatctatttgtgctcatctgtagaatcctacagacactagagactaaatgatattaattttaggaggtgtttctaaaggagaaacagacaacatttggttttattatcgtttgtatccctcagaagttgtgtgtagacaactttcatctaatacatcaatatcgacttgtccaagtttctcgatgaagtgaaaggatctgattattggctgtgtcttagcgtctgtaggaagcttctaggctatttgtgtacccaaatttaaaacttgcaccttgtttcattgaataagtgtttttcttatttgtgacttggaaaaaatagtgttaatgtgatgtaaaaaacctattatcataggcacaagtaatgaacactattggtcatgacagattaaaatttccttggaaagaaaaatgatagtatcagaataagaatacatgaggaatatatacatatacacctgcttcacacagaaagctttctgtaaaaaaatacaaaagcaaccagtgctgtatattatgtaaactcacaaagtgtaaaagtgtactttatacacaaacatgaagcataaattaaaaagtaggacaacagcaaaacattttaaatatagaaaaatttgaacatatttttgttaaataagaataaataattttatcacacaaattcacataccagttgcaaaaacaataaattactttttttcagtgctgcaactttttttttgtttgtgatttatcccctaattcctagtttagtgggataaaactgtttccacaggaaggcaaaggaacataaatttattgaataaattataacaatgcccacatatttctaaacagcaaggcagggcttaatttaaatttttctgatctagaagaaataaatgtcattttttctggctccctttgtacttaataaaacttattatggagtgcttagttatgtaagtgagattagattcttacaaacctgagcattttcagacgaattcttttttttttttttttttaaagaagtagcccctagcatcctgaattctagacattttaaaaaattcaagatgcaacaatggaaaggtgaaagacagtacgaagtcaaagtggactgacttagattgagttgtatagaattttccctttgttcacaattcgtggtatctattgaacactccatttctctgaatttcagtttccaatccatatcatcttctccaggaatttagacatacattcctcagtcaatctagtgagactcataagaaaaaggtggagaaaactacttaaaagcatggaatagtggtttaattgctctgagctctctaggattgtttccatgacaggtgtaaaccatcactatttgagggaaacatgaatcattgataaaccatattaaaaatgtatgagtatagtaagagaagcagagtaggagacaactacatttatgcctcgagtattttttaatgttgttgggaatataaccacaaaaaataaaaataaattttgtcacatttgagttacttgattaaaattatttccaaaatggaaaaaagtaacattaacctctctcctaattctctttgcacagacaaatggcactgggattattattttttttctcacctatttaactaggtttgctttctgcccttggcattgggtgatctccatcacatataggttatcagccttgtacaggcctcatttctcaaagtgataatttattgagaaaaaaaatttctacgtcaaaagcaaagtcagtctatgaaaattcaaaggataattattggttttgtaaaacaattatttgttttaaaagcaatttcttaagaaaatactgaaaacagcaagacatctattttcctggcccactgaaatgatgtaatatagtgatcagttacataattcttttatattaaaaacatcttataataaaaataaactctcatgagcttgtagaactcaaacagtggttccctaagatcttcacatgcaaatctttaacaataggcacatttggcaggattactatgaatttttataaagaaaaattggctttgcagtgtttcacaacaaaagaaatcccaaagaaatcaaacaacttagattttctaagttgtgaggttggtgatgggggggtgtacattttatcatctaaaaagatatctttaggtgtgtgcttataaaataatttccatgtctaactattcaaacttacaacctacttaaacaggctatggaaacaaaaacaacaactttctgaaaatcatcacatgtcatcactcaaacacttacgggtacaatcaagtgctttccagttgggaaaaatatttagtacaataggaatatacttagattttttaaattaagaaattattgcctatggtgtggaaacagtcttattaatattaaccactttttggcattaaccacattaacaatgataaccacttctcaatgtggctaactaccaagtgatctttaatgtttctaataaaataagtcaagaaatacaaaacattgtaggtcttactgaacccttgaacaaaacaaataagcaaacacaaatgcattttaaaggcttgctggtaggaggtataccagtgttgaatgtgttggacatgatagaaaacttgctgtgtgttttgtacgtatatcatacattgtgagatatcagatgaaagctctggagagagaaagtagttgtgaaaatataaattgaaaacacagtgaaatacgatttttttccttttaaatttccaacacaaggaaactagtttttagactcttgagtatgatcacacacacacacgcaaaccctacttctacatctgaaattatgcattaatttggctagctacctgaaaaaaatacaggcagtcaaaggtttaagtaaatgaacccgtgtatgtatttaagtgactagatacactgagatctatttacttttcaaaatttctcagaagatacttgctgtcaaaatggttttttgactgaaattttatctcctgtagtcagaaaatatactacatcttattaaaacagcagcaagttcttaatttccagtaaaatatccacagctctttctggaaacggaaggaagttgaaatagctgcagacctactttggtcaaacactttttttatagaaatatatatggatattttaatagaaccaggggatataaagtgacataccaagggagaatgtatttacaaacagtaagaagaagctactgtgtattatgggtgaaaatgattatgataccattaaagacattctatcagaggtaggtgacaagggggagacagttctgccatcttcaaatgtcccctgattttacattcatcagtgtttcttgtaagcccaggggatgttcaataactcccaagtttttctatattgcaaggtcaccactgtcacgtgaagcagtgcacatcctcttttggtcacagagagcagattctgcccataattggactcctgttgacaatgtcactgaagcatgactttctgtgcgttaggtagacctcctgttcaccacgactgcatcagtgctgaatcctccagttatctttgtgcataagatcataaccacaggctaacatttcttcaacaagcattgcttaaacgcagaaggcctttgggagagaggacatccttttgctaacttccggtttccatcctggcactgcaccgttctggtgtgccaacctgtgtcacaggtcctagagcaggcgagccatgggcccgtgacccactgcggctgcgaagtgtgtgatcccactttattgctgccatgactagtgacagagtttacttttggagtggacttcttgggaacaaaaaagctataacggacatctaatggtttagtggggtctgttgcaagaatctgcactattagaatttccttcgtggcagagtagcccatgccatgcaggaagtcatccctgtggctccaaccgctatagttcatgactgttccattgatgtcaatgatagtctctgaagtggagatcatgtactttccattgataaggtactcaccgtttttctttttcagggctaaataggcagtgaatctagtctggtctttggctttgaactgtcgaacttttatgtgggttgccccttcaggaatcctcaccacgtcagtgtaacccttactggaagtaggaatgttcacaggaagtgggggaaggtggttaaaaaaagggagaaaaaaatgagtaaacacttaacaaataaatacacaaacagaagttctctaaaaagtcttctcttaacacacagttttaatggattagtttaaaattgggtttaaaaattattttttatgagaaaattgcaattatactacagtattgtatacactttaattgaggtgttcaaaattaggatgatgctagcaacctgccttcatttaaaacatttatactaactttcaagatttatacaaccattttcatccttatcagatcctatcatctttacaaatctactttccattctttctggcacaaaatgggatctgtttaaacacaaactgacaaaaatatgccttcacttaatctcacataattctttaatatttctcagattgcttccacattagaatcacgtggggatcttttaaatctttcagagcctacccacacctcagaccaattaaatccccatcttccagggtcgggcacagtcaagagcacttttgaaacttctcacattgttccaatgtgcagactaacttgggaacacagaattaattagtttttggactagaggtgagtagagtctctgcattcctttctactagaattctggatttggtgggacaggccataaatgaagcatgcaattctgaaattgggtaatgatattactaataccatcataaaaggggaatttttttaaatgacttagagaatttttctgaattcttagtgcccataagatacgatagattgagaaaggctttatggtgagtgacatataagtcttcaaagagccatcatctggacaaaaaaatggggaaagacacaaatatctttaatacccataaacctgtgaggaatgctaggatggaaatgctaattaagcaccaagggtgaaatgacgagtcaacttttgtccacatttttgcctttttaagtaatttcataatagggtcccttcactttcctagttatttaaacaggaatactattggcttgagcagtttgactgacgtgtggagctgaactgtctcatttccagttctcattcacatgctaaaaatccaagtgtgtttcccttactccagagtttcctctgaattggaaaggaagcttatcgccaaggaagtcccctgtctgcagggcaatctgttctacagtgacagccacacaggtggtaaagcttcctacagtgttgaagagagatgatgcaatgctcagggcgttccttattctgtctaactcgattcattatttttatttttgtaatacattacagatcagattttgttacagatgtgttttgtagtacctaatattaataaataatccatgaaactatagtggcttcaaagaaagtcaaaagggatgttggagaattcctcgaggtcaggagtttaagagcagcctgggaaatacaggggaggccttgtctctacaaaaagtaaaagagttagccagggatggtggcgcatgcctatggtcctagctactggcaaggctgaagtgggaggatcgctttagcccaggtcttggctgcagtgagtgcaccactgcactccagcccgagtaacagaatgagatcctgtctaaacagaaggtagttggagataaatataacatcttacacaaaaagagtatgaaatggggatatatgacagtatttgaacaagttcactttagagctgattagtggcagtgttaggcttaaaagccaggcttggctggatgccgtggctcacacctgtaatcccagcactttgggagactgaggcaaggggatcacctgaggacaggagttcctgaccagcctggcaaacatagggaaaccctgtctgtactaaaaatacaaaaagtagctgggcatgctggcccgtgcctctaatcccagctatgctggaggctgaggcaggagaatcgcttgaacctgggaggcagaggttgcagtgagccaagatggtgttattccagcctgggcaacagagtgagaccctgtcttaaaaaaaaaaaaaaaaaaagccaggctcttgactcccaattagcgctctttttcactatatccccaggcataaaatcctgacccctgccagccatatgttatagcagttaaatgaaattaaattctggttatgtgcagagtttaaatgatgcccagtaaggagtaagtaaaataaagaataaagggtaagggaagcttttttgggtgtttacccttgttccttagagcttatctcatcttgatgagaattagtatgatggtcagtattgctgcaggtcttcaaactgagtttcacaagcactagtaaacctgagtattagtgccctgattttttagtgccttagtaagagatgattctcttgatattcctgattccttttctttacatcctgcttggtatcatttaaactccagacactaaccagctttcccgactaccataagtgaatgcaattttcatacaactcttacaaagtatggctggcagggcaaaggaatcttgttttgttcagggctatctgcacagtgccaaggacaatgtctgtcatgaaaaaatatattcatttatattcaagcatgctctcagggaagggatgttttagtccgctcccagcaaacaaaatatgtggtgatatcaattgataagagctgtgaagaaacggagtaaggtaagaagttgcacagtagtggtgggagtggaggagatgtcctcttgtacatttacggtagccaccatctggggaggtgatatttgacagagacctaaagagattctggaaagtgtactgctcattaatagcagaaagtgttccaggcagaggaaacagcattctcatacctggtgtcatgtttttgaagtgcgagaaagtgcattctggtcagagcagagcatgagaaagggacagtgtagaaaagacatagaggagggaaggggccagatcttttagcaccttagagattacaaaacagtcttgggtattgagtctaagtaagatggaagccattggaggctactgatcaaaggaatgcaatgatctggtttaggtaatagccatggcttcccttgcttggtaagatgagattgaggagcaaaggatccagaggtcagcgagaagactgcagtgttagtccaggcaagatctgatgaacacttggattgcggtgggagcggtcacggtggtgaggggcacccagattctggagatgtggtggaaatagaactgacaggatctgctgatggatggatgtggggtgtgagagaaaatgagacgtgaaccatgcctccaaagttttggcctcaatagtagaaagactgagttgccatttactgagatgaggaaaactgagggaggagcgagttaagattagggtcatattgtgaatgggcttaaaattgatgaaatattttaatatgtattacctcatttcaccttcacaacagttttattaaccatatgataataattaccagtatttccactttacttttgagaaatctcctggtaaagaaattaggtgacaattcaaagatcacatgtctaaggaatcattgagccaaagcttgattacaaatattgcagtatgagatcaatgttctttttcataaatcatataaattactatggcctccctaggtaattaatttgaactactcaaacatgtcatttgtaccatagtagaatcttggtcaaaccaattttcaggtggttacattgcataccacttgttgctataatgaatttcttctttttcatgtgaaaaaatgtgcagatattagttgtcagcacaaaaatacttaaaatgctaaatttagcaattttaaaactggtttataactttatatagaagagaatatgtaccataaagtgtataaggtattactttttaaaagtagttttgtttctaatttgattcctgaattccctctctccctcctttcctttttctttccttccttccttccttcctctttctttctctttcctttgtctttctttctctttctttctttctttttctttctttctctctctctctttctttctttctctctttcttctatctctctttcttcttttttttttcaaagtgacctgtgtattctaggatttcagttatggtgtctgctcttctctggcattcatcagccatggataattggctaactcctatattttcagagtccaactcatttttaaaacagaaggttggactgatcatctccaaggtgttttatacctttgaaacatataaaaatgcaggatataattgggcatgcagggtttttgacatagatggtctaacacaattaggtgaataattatttcattagcaaatagaattagtaacgcatattttaactcagaataaatttttcagccatatattttcaaatcacatcagagaaaatttatagttttttacattaacatgtttaattattttaataaatcctattgttaatttcgtttgcatattactctcaagttacagacaacacagcacgtacatcaagaatacagatacatttgactaataacactcagcctaagagtggtttgggaagaaaagcaagcctgtattttaccagactctagtcaactcagtcatcctacctgatagcatattttatgccggaaattggtacttcataaacttgaatatttaaagcaaaaatctaggaccataagaggaagcaggagagagacactgctgtatatatttctttagagagtagatataaaccaggatacttcactgttgcccacaccattgcaatgaacttacattttgcaaggggaaatattttcttaaggaaaacacagtgtaaggataatttgtttttaaaaatatagttaagatcaaaaccaaccaaccttccctaaattatgttttaggaataacactagatctgcaagatatcactaaagtggaatgtcccccactttttcttttcagttttctgactctacaagctattgattcccatggctactgcagtttatctgcttccagaggcagcatgagttttccctgagcaaccagagttttattcatctcctgtctcttccttctcatatttaaaatgtgtttctagagccacgttagacctcctcatacagatagcttatgatgtaatatgaatcctcctttatcaattctgcaagagtctaaagctttgttcaattcacataaagacaaaggttctatcatattaccttttcttattaaaggttccaacaatctttgtacagctggagttgtctcctccacatactccgcacttgtcatactgcagctttgagccaatgatgccgtcacagccagttctcacacacttcccccggacgcagacggaattactgtacagcctacattcagtgccatcggtcacctgaatcatggcaaatgcattaggagtgggaaatgtttgcatcagtatttgctcctttggtcaactagtaagttctcatttgtgattttttgagtttgattggtatggacagtccattgaaaaaaaaaaaagccaaaaaaacatagtttccagaagtagctaactgaaaaatccttgtcatattgccagaaagcagattttggataagcctaggttacacattttctctcttaaccttacctctgaatgtgttaagagacacaaggtactcatcttcgtttttgtatgcataatacattctcactagaagtaatcttttcacttagtgtttcagactatcatttgtgtgcagaactgaatatgagcaggcttgagaatgcaaagatccttctttgttgcatagttgttattataatgacaaatttgaaaatctaaacttgacattcaaaactgtgtcatggttggagagcattccctattgtgtgttgaactgtcagacactgaaatcgacacaaccaaattagtgcagaaaaaggagtctggggaagttagatgaacggacttactggaagagactgaatatattttgaataaacggattagtgtatagtttaaaagctagttataaaacagtgtgtatatagattgtggcttgtgcatgtgagtatatgtaatatatatacactcatatatataaataagcctgtaaattttatatttatgtatatagaaaactctttttatgcatgtgtatgagtatgttgtgaatgcgtgtgtgtgtgagttgaagtagaatatactttatcaggttaatagctctgtagatggtggtattttcaggtgatttttatgtttttacttctgtgtaatatttttgaatgaaaatgcattattttctaataaaaacatgagctttaaaaaatttcataaattgacattagcttgtttttcaataacatattataaatatctgaaggccaagtttcagaggtaattttttttttgagacagagtctcgctctgtcaccagactggagtgcagtggcgtgatctcggctcactgcaatctctgcctcccgagttcaaatgattctcctgcctcagcctcccgagtagctgggattacaggtgtgtgccaccacgcccagctaatttttgtatttttagtagagacagggtttcaccatgttggtcaggatggtcttgatctcctgaccttgtgatctgcccgcctcagcttcccaaagtgctgggattacgggtgtgagccactgcgcccagccataggtgattttaaatgtagcaactgtttacaaatttgtaaattgctgtataacactgaccataagaataaaactctgctatagatttagaaaatgctcacttgtgaaaaataaggcatgttccatacacaaatattatacacatacacaaggattataacatatataactagagggacattgattcatattaagggttcttgacttattcaaaagcctgagtcagaggtatatgatcttgaaacccatctccacggctcatcaaaggaattcttaagtaaatcatagaaaaatagaaaaagttttcttgctttatggtctcctttacaatgctgcttaggaaatactagttgttttcatggttactttaaagttaaggtcacactttgccttccttgacagtgagttacaccttttacagtgagttacaccttttaaatatagcttttaaaacatttacttgttctgtttataaaataatttttattcattgtgtaaagtttgaaaatatagaagttatagagatgaaaataaaaaccttccaaaatctaactgaccccaaactaataactgtttacgtctggcgtccgcaggcttcattctaccaaataatttccaccagtacgcctactgcttctggacagttggtgtgtagttacctttggagaaaataccacatagtagccagtgcccttggctctgcaggtcagcttgcacacatccgctggcaggacacctgcatatttgggaacccattccacaaaagttttgactccttttgcatcagactgatagccatttttggcctcacactgttcatgacgaaatgatttacctagaaaacaaacatgtttcagtattaccttatcagttctgaaacttagatatattcttgtgggtttaaatagttaattttaaggggaagatgcaaacgtgttttttttatcccacagtctctttactcaccaatgctgatggattttatctatacatagagttcaaaatggtgattatttattccaattctctgaatattgcttataataaaacttaaaaatcacatatgtggctgggcgtggtgcctcatgcctgtaatcccagcactttagggggccgaggagggtggatcacaaggtcaggagtgtgagaccagtctggccaacatagtgaaaccccgtctctactaaaaataaaaaataaagaaaaaatagccaagtgtggtggtgtgcacctgtaatcccggctactcaggaagctgaggcaggagaatcatgtgaacccaggaggtggagattgcagtgagccaagattgtgccattgcactccagcctggacaacagtgtgagactccatctcaaaaaaaaacaaacacataggtgtttgttattgatctgcatattggtggaactgtgcagtataagattaatattatttccccagcttcccttattcattattgctagaatacaaatgacatgtagcatatgatggttgctgacacttgggagcagcgtaccattgggtgggcagggcatgagactgcaggagcggtagatggccctcttccctgtgcagtagcgtccgttgtttctgggagcagggttattacagtgacgataggcaaactgcactcctcctccacatgagcgagaacactggccccaggatccccaagatccccagttgccatggcttgacgtctgaaatagagaatagaatatattttaactccaatgagagaaaaacattgaaagtgtgcatttggaaatcacctgcatttaatgacaaagtggaaactttgtcacagatacagttatattttcactgaatttaacatgatcatgctttggaaatgcaacacatttccagtgctaagcaattcatcttttccaccctcccaactccagcactagaagatctgaaagcatcatcctaagtactgagcacaccacaaagattatcaccttttggtttctacggaccattgtaaattatgtcttctaatatggtccatctctgttaatatcactgaaccatggtaactttttgtccactctgatgttggatctttattgaaacgtataatgctgaaggatctgcatggcactgggcattatttaattgtgtttgcatctcttcagcagtaaaactctgcagtccctttgttgacatcccacatcctgtctgtgaccgactccatgacgttcataaatgtaccggacccaacttggcttaattcctaattagatgtgacagatactgaaatgcactcacgccatacatgcagacacaccccttagggaaggaagagcccttttatggcaacctaagtctgtttctctggaaacattcctggagggagcttagagattctgaaaggaagaatatgatcagctgctttgctgagggaatctgtgaattgcctctggctgactgtgtcaggttatctgatgatgaatggttgggtgatgccctggaaagatacaggcaatgggcacaggataattctcttctagggactttgcaaatcttgtgggttgagagcgagcacttattttacttaggcctcgaaaattaatagggcagttgctgacctgaagctggactgtgtatatagtggcagacgtgtttccccggagcagtcgtaagttactttagctcctaaatttagattaacttattgtcaaggggaaaaaagtgaccatttggagctcaccaaatatgtacaagcaccacatgtatcggctctgctattacctccttactgaatttaaatacttatattctgataactttagcaagagaagcttgaaagtaaacttcccaaaagcaattaatagggtcctacctgaggtctcaattagacagaatctgagttacataagtatttgttaaaagatgtaaactgcaaataaattcccagtatctgcattttccccagtaaatctcggatcactgagaatggctactgcgggtaaaagaagaagctctaaataaacctcaaaatgaaaagtttttaaattagaaaataaagccttctgagaacagtgcccatacccatcacaagaatgcacttcacttcttgggcctccaggcattgactgatgagaaaatcacttactgaataatattttttcttggttttgtccacacatttgccctgcaggcagattctcccctttccacaaggcgtcccttccaccgcaggcagcttcttggtcagacagaccatctggccctggcgtaccacagcacaccacaggcgagcacagacatccatgccgggacacacggagtactcaggcccgaatgtcaggttgcactgctgggtggcatcgtaggtctgtcctgggagttcttcggggcccaggatctgctttcgtggtaggtccagcaaacagttacctacaagaataactgagattgaccacggctctgtgtttaggtttcaaaccgctaaaatcatggatctaaaaatgaaatgccccggctggtgttggagcacgaggcacccatgaatctgtagtgtaatgctctggagagggactccatggggacaaggctgggagcccccttggacgcaccagaccctccagggttctcaggagtgatgcgctccggagtgtctgtaacaacagaggtgaggttggcaggggtgtgatggaataaaatgattctgtaatgattagttgtgaaaatagcccttgtgctaaggcactaaacaaaattgggatggacctagagaaaatcagatggtgaattttaataataataataataatgataatgaagcatttactctaccactttgagaaacagagtttgtccttggcactctatctgtataacccattacccatttctaactcaccccttccccatgtgcctatcacatgtctcctttccactaattccataaataatagccaagctggctcctcattcattcttacagtcactcgacaagcatttgttcagcacctacaatgttctagaaaacacactaggtatctgaaatacagaaaaatgacccagatctacctttgaaggccttccaataaagtcacagagataaagtatttctctcagactgatataattttaataaaaagttttcaagattcacagaacaaaggagcagtgaaaaaagaaaaaatagtctttgataatttaggattaagttagtctttatactctttgctttatgtctatttaatggaattggtgtttgttgagtatttggatctatctgccgaaacaaggtaggcatctcattgcatcatatatgagggtgtacaggcagaggggtgagatggggaatccacaaaagctggaacatggacgatgagaatccaaaaccttaaatttgcttcctcttcctctccttcccctccccgcaaaagcttccctaagaatccctgtccggtgagttaacatcattaattttcttttgtcacccacatatgcatgcatattgcccatctgtttctgtatttttctgtttactttattttaggatttacacaattattataatagcaataaaataacaaatatttgttacacacactattctccattctttacatatatgagctcatttaatcctcaccacaaccccatcaggcagattctagtgcatattttatttatcctacagataaggaaactgaggcccataggaggcagaccagttacccaaggtcacacagctgttatggtttcatgctcagagcctgcccttttcttctgatgccatatggcttctgttagcatgtgagtagctgcctgattgtattgctgaagggcagccatgtgtaaggatcctttaagtggtagatattgagcttaatggaagaaacacccagtctgaagtcttactctggtgaaatactaaatggttgagtgctcctggctaagttagctaacctctccctaatttattttcaagatctgcataatgcttctcttctcactgtgatactgtaaatgtgaaattagctaacaaagatcttaagggtgaccagaaaaatacaaagcaatggtagttgtatcccagtatatttaacagccttttagatgtactacagttattctttttattcaacaaaaaagtcatattcaaatccttatgtgccactgagaaatagaatattcagcatattttaagtatactgtaaatttttaaggactacattcaaatttcttcaaagtgaataccttagaatttgtcaatctgtgttgggggcattatataaaaatgaataaagagcaaagttcctatttaacttctgagccagaacgtttgaagaggtaaagcttcttaaggcaagccagaaaaagcattaaaaataagaatccagccaaagagaactttgggagaaaaacaccaagttaaaagaaaaacacgaacatcaagccgataggaaagaatgatagtaaaagctcactaagctttgtttataagacagagtgcgattagggcttcagaactccacgaaaaacattatcttcattgcagaatcaaaaaagaagtactgtgtaaactaggggatgcttggcagattgctgatgttagaagactgtcaacaaatctctgagtctgcaataatgttttccagttcttcaaaagtgctgttttaagaaagtttttaaaaaaaattttactaaaaagcacagaccataagactgggtaactaaatattagctaggaagtctttaccatgtgtgcatgcacatggcatggatctatctcatttttctggagtcaaaataactcaccacctgactatgcatacacagtcactgacacctgttctacctcactagtagatgacaagtgaaaaagaaacgtgtaatgcaatttgaaatcggcttccaacaaggagacttcaagatgtggcatctctttaaaaagcttaacttagaactgtaagttttaaaaataaataacacattagctttctattcaaaataagatatatcagctctataattttcccttagaggtcatacatgtggagatgatcttctcttgcttaaaataaaataatttatttcagaattgcaattaatgtgttatgccaatgttctcagtactaggatttgtagctgcatcaatttctgtttatgccaaagcatatataatttaatttttacattgaattatgtccttttgcaacaaaataggtacaagcatctctaccaaatggcagaatggtgccaagaaacagtaacaaaaatcaatacagagcctaagtctgaaactcacagtataaaatgtttaaaatctaagtaataacagattggatatacattttatatgtttaagaaatgtatacagtttggggaaggagtaaaaggggaaactgatcaacctttcagtatcatttctagtgagctctagaggcatccaacctagtgctgatttttttcttaatctgttttaattttattctcaaccacttcttcacatctacttcacatattttctaattcatcgtagtctgaaatttgatctggatcttcctgggaacactttgacccttccctccttcttccttttgttttaacattgtatatttataaatggatagactataaaataaagtcaggccaggtgcggtggctcatgcctgtaatcccagcactttgggaggctgaggcgggtggatcacctgaggtcaagagttcgcgaccagcctggccaacatggtgaaaccctgtctgtactaaaaatacaaaaattagctgggtgtggtggcgggcgcctgtagtcccagctactcgggagggaggctgaggcaggagaatcgcttgaacctgggaggtggagtttgcagtgagccaagatcgcaccattgcactccagcctgggcaacaaagagcgaaactccgtctcaaaaaaaaaaagaaaagaaagaaagtcaataggaatgtgtgcatattgcatacatgtttttaccattcatgttaaactaaatgcttaaaataaggcaaaaaaataaaaagtaaaatgttgtgatttgaggcgaaccagtaagaaaatgtgttggcagaattccactaaaggtgttggaaggaatgccacgcctccaggaaatggaacagaaaaatctctagtttcatatgtctgacttatagcactatttgtctctcatattaatgattaaccaaagttgtttttttgttttgttttgttttcagatggagtctagctctgttgtccaggctggagtgcagtggtgcaatctcggctcactgcaacctccatctcccagattcaagtgattttcctgcctcagcctcctgagtagctgggattacaggcatgcgccaacatgcccaactgatttttgtatttttagtagagactatgtttcgccgtgttggccaggctggtttcaaactcctgacctcaggtgatccgcccaccttggcctcccaaagtgctgggattacagggagtgagccaccatgcccggtctcaaagttgttgttctttattgttttcaaatttttcttccctatttctagcactaacattatttccatcttctcttccttttcaatatgcaggtatgaaattaagcatgacccaaatattcatgatgcaggagaaatcaattaatgttcctaatcaaactcatccgaagaagcctaacaccactgcttacaatctccctttgcttccactcttcatctcactgcccttgcccctcagcttttaggtctttacttgaatgtctaatgttaaaagaaaaatgggtgcatttgcctgctctttgatcactcattctgggcccagtgatataagaatgaacaagagcacttcaaaaaaccagacaattgttgtcaaaaagcaattcaaggggtctgggtatgaagctgttagatgcattaggtatattgttgagcagatgtaatggcaaggaaattaaattaaagattccctgtgatagaggataaaggaaagtttttaaaaatataagtcaccgtggccttaaactatatgtcttattttcacactctattaaagagcatatttagtatgaaaatcaagatacaaccatagtgttggctttgaattttattaatgccaccttaaaaactgatgttaagctctcctggctagctttagtctatatacttaacaaaagattcagagaactggttttccaatatcattttatgtgcaaagttctgtgttcagtaagtggctgtaaacttagctctttacactacatgacgaattttcaaaaccatccatagattttccttagcaacctgtgttgtgagtgttcttgagctgtatctacataagtcatggcctttctcatcatctggcactgtggactcagggatacagcagacacagctatcttttctggactcaaggttagtaaacatttgagaaaggaaattcaataacctgctttcactgcacaatttctttgccagtgcttacctttatttttgaggatcatactcctagccagcttgcctagagctagcttgtataaacactgcagaatgtctacaagtatcttggccaaggttgggaggaggggggtcccatgagacatggcttctccttttctgaatcacaaatctgcagacacagtgactttagagtgagcacgctggtttttcaaccataacctaattgctgcatatttcttgttggaactaaatcaggaaacactcagtactaatgaatttacatttggcagtggacgagtgctacaaatgtccagctacttatggctaataattttaaaaataaatcaaatgctttgaatttaactttactctccgacctcatttctccagtattgctgaaggtgagagggggtggggtaagatattagacataaatggaattcccatttataatgtactctttaggtaccattgaaaaattgtatatgtgttgtcagattacctgcttaaaaatagcaaattgcttttctgcctttatactggtcacagtttaactttcctagataactgaaagtcatttttttctgtgtgtcaattattgtatcatgctgaaatatagcactaacttgagggaccatgttggtgagatagggcttttgacctttagaaaatggtaccagaccactgtgcctttcatgttttcaggctatttatagcctttctcttattgttaaataatatcatttcttgttctcagattacctgtctaaagtctccccaccctcatccatcatgactattttattgcttaaaaaaattgagtggcctagaaaattagaacagaaaaatggtagaactgtaaaatactaataaatgggctctgagtggaagcctgtgtagctttctatgagtaaagttaaaaggttttataatatagttttgtgacatcgtttagtcttctaacaaagatgcatctttgttattctatcatcttggactgtgactgtcttcttagttctctcccatgctctgtagttgaaatgttagcacctcaatcatctctaaagtgggtttggtagtttctatggccacactttcacttacattgacttaagtgagctttttggttacaatttaaaagttattaagttatttcaattcatctttaaataatagcactacagggagtaccactgtttcaattctgaatctgagtatgctcttttgaaacaaagtaagacagacataactgagctttgtcattgtgccacactgcttttctttggtttttgttattctgaaatcactttattcatgttataagctactgataaaataggattatttttattgaaacaaaaggctgcctaaccaaaccaagatattcaaaagtgagaaagtctagattggatgaaaaaaatcaaataagtaaactataagcattttctgctcaaggaattttgataattgaatttatttaatatatatacatgagaaatttagatacttttttattagtgcaaatgaacaagatctatttctattaaaattatgttcttagttgttctctatcatgagccctttggaacagaaacagatataaaaatatgtaaatttgttataaaatctttaaaaaatcagagcatagactcttttaaatatagaattaatgttaaaaatgaagacaatgctgaaagcatatttactgcatagaaattaagatcacaaattccataaacatgaaataaatgaatcattccaaaattaggaacaaaattctccacagcattgtaattagctgacctaatatttgcacagggaaaaaaatttggtctcattttagccataagtatttgctgccttagcaactaaatccattcatttagtgattcaaggtttagctcaacttcttggaatgtgtaacatgtgattttgaaataaaatattaatgttattttattttcagaaaacctgaaaagaagtaaaacagaaaagcaatattatgcgtggagacttaagattccacccaagaaggactttatgagatactgacctgatcaatgtagataggatgatagtaaggtaacattcattttaggactttatctgcatttaatccacaatgtaaactgagctaaacataaaattaccattgtattactggtctaaggaaaaagcttcatacgttaattcttattgttgtttccaagtctttaaattattgacatattttttcaactaaaaaggaactttttttttgtattgagatatattttaaaccaagctggactcagattgcttttcaaaatgagacaagcaaatatatagtaacaggcagctaaagccttacctgttcaccacgaatggagcaagaatgggttaatgaacatattttgactccatggtatcagagaactgtgcagctgaatttctttaagtctgaaataatttgaatttgtccattgttctggtattatgtagccacagttccaaacagtcaacatactaaaaaattatgggacattgagtcataaactttgtggaactgggaaaaagacggttgccatagattattcaactttgaaccgtatatcatgaggtaattttatagaaaattattatgatcaataatttctgtcacattcaatttaactactagttttagaaacataaattttaagagaacataaaataaatgagaatatgtccatttctgtaacataggaaatttcagctacataatgtctgatgattctttagagtgctaatgcatctatcctcctgtgtttttattactttaaagtactgaagaatgcttggaaatttgcaacagcttgtttcaaagattacttaggggtcagaatttattatttctaaaaattgtaacttcctcagtatttcaatgtaatttacagcactgatcctagtcttacagaatttaataaagtatgttgtgctcttgaactatatttgaaggataaagccaaagattttcttttgaagttcttaaagtgttttcccatcattcagattgcttttctatttctgttatgcagtttttactctactttcaggagaatctcctatcagaataaaaccaaattcttctagtcagtgcaaatctagaaagcttcctcttctgggcttatgttgccataaagagaatccagtagaattgtcacctacaccttaactgcacccctataataggcatgtaacaaataattctgagagtcatattaatagcagggaaaccaagatgtctgccaaagttctcacaggaagctagtggtaaaagaaggaataaaagccagactttcagggcactagctaggcattctgtgtggtcttccacactgcttctcctttgaaatttttcaattcaaaagccaaaataccatagctaaaatgccaccaaggacgttggcagtacatacccacatatgatcaattttcttggtctttcttctgacactatccacacaactattgtcttagagggcaagatgaatattatgaggatataatgaagtcaaactcctaagaatcccaaattttgtttctcagtctgtgttctcctaaatgatacataccatggccatcatccaggaattctgtgatggtggctgaagtgcatttggaccagggcttagatgcatcaatgctggtaaggatggaagacattaagcgcttatcttctgtggaaccaaaggtctcttcacagaatttggaatcgtcatgggagaggccaagtaaatgtcctaagggagacaacagaggaagtacaaataatccgtgattgtgtatttctatctttccatgacaattatgctagggcttgatttttttcccctaattgtagatgagttcactttaactgctttctcacccagagactggacctccagggaaataaaagttgcatggagttagtgtagcagttgcttttggtgaacatttcgatggaaactgaaaaactaaagagtagatgttcccataattcatctggatcacatatgcttaatgtcatgtggaaacaaagccttatttagaatctagagtttgcgagacaattgtgggattatgtcatagccctcaccacgtatcattttgattgtctaattttctgccttctctgatcaagccccatgagatcaaagtgcatttgctcccatatactgttgaaacctctgtattgaacttagtgctgtgcaagttgcaaacacttagtagatggtttttgaatgtcagtgacttattttcttagtcaagtaaataggtggctaataaaagggaggactaggggagacaaagaaagagaagtgaaatgaggaagtttccggtttcttgcaaaactaagcttgcttcatccgttcatttcttttggtgatttagtgagttatgaatgtttactattgtcacaaacatatagctcattttgaaaacatacccatttacattttaaaatgtcaaaataccaataatatggagtttgagagcttgaagaaaggacagcttggtttcccaagtgatagttgtgagtgttcaaaaccactcagccaggtgatatttgtgcttaagcctctcaaccaacaatgttctctgaagttccagtcaagctagatattatttcacagagcccataattgcattcttataatccaagtaaattgctttttattacataagatcaattttcatgcagtctaaagataaaatgatattccacaacaaatttacaatgctatttaaaacatctaggacagtagtttgagcaattacaaactctaaaaagtagacagcaaatcatcctagtggtgtttttaacaaagctttctagaatcatacacaaaccactaaaacaaatttaggaaacactgtagcaaactgatgactacattctccttgggatcttgaatgccaaacgcagaaaactttggccattctagcaaaagagtccagtgtgcaccaataaaacccaacagagatgaaatctttcactttatattccgactactttgggccaacttgttaaatcaccaacacctcataacaaaattgtccactgagcaactgactgctgttatggctgaaaataagtggctagggctcggtgaccttccaagcctccacatttttatgttatttatacagatatttacttcgacagcatttactaggcttacaagttttctctgggaagttctcccaccaccacttaacattttgtttggtcagtagcataagtgtgcattatagtctatatataaagtatgtcccaaataacttgcaaaggaaattagcaggggctcatctaatttttgagtggtttgttgagtttttcaagaaactcacagctcacagaaaaaaaaaaaaaacaatctttcattcatgtactattagaaatgacttaaagttacttagtacatgaaatacttgctgatatcgcactctacacttcccgaaattttccaagatagaagatttatcagttaacactgagggatatggtggaaatttcactcttgagttttttcctctggcatagaagaaaagtgtccccaagtgacctctgcaacataatatttatttgaatccaggtttttacttaaaaaatgtgatgtatacattctacttcataggatatttatatttatttaatgaagtaatggccttttcctccaaatctatataaatacatagcactttccatatgcctttttattattgtatcaagagattttcacttcatttggagggtagattttagaattctgatttaaaatataggacacatggcagacacgaaattcactttgagggacctgagaaagtaccttcattctctctttcagagaggtgaagcatgtaattttaaaggtttcaattatgtaagcaagtcaatttaattttgaaatatttcagcatcatttatgaatcttttggaatactagttaatataacattatgacttctatgctccccaaatttgctcattttccactgaaacttaattgccactgaagatgcatagaggaaattgcactgcgaaagactgcctttcaagcatgaacaaatctttgcttcacctcagcaaggggatgtgacttttgtaagatctccaaaagtcaggcagaaacagactgcttagagtcaactgaaagagatcgactcttttgagggcgaatgaacactctgtgctccatgaagaaagcctgtcagctctctgggagaggcatgctctctcaagggcagcgagagtcctgggcaatgtgaagaacacttaagcacccaaagtaacaggcagccagttccagagtagctggaaccagggcatggcgagagaaccgcgtgacttcccttcaggagctggacaggatatgaaagggaagatcaatgtgagggatgtttggatgctcttcaggaaagacgtgacacacattctaaaggctgcaaacagcaaaaggagtggtattttgtaattcgagcccccagtcaattatgctaagacatttactcttagttgaaatcggccttgaaatagcaaaagtatacaaaagtataagcaattttaaaggagtgctcacggtaaagacggcacgctatgataccaaaagctaactaccagagaaaatccagaatccggggaatttaaaatacagtgtcacagctgacaactgtcttttaagtagggattgtgaaggggaattggaaaagctaatagctttgaagacatctgccttttcagggagagtttgttcataaatcattcacagagatgtttaaaatgaatggtgtggtttggagattaagcatttcttggacaagcagaccccaggagcattagcagcagataggattagatatccctgtctcagagagtaaaacagcacatgaagaatataaaagagtgtggagaaaatgtgtacaatgccaaaagtaatttgttgtttacatcaaattgtattacatgatgagtttttagagcaatacagagcaacagagttagttgagggtgaggttttagaggaggcagggggatggaatcgagaaatccacatagaatggcaatccttacccttggaaaaagagaaagagttcttttttggagagtcagagtgttgcaagagaagggtggggaggactgaaagccattttgacagagatctgaggaagctccctcactaaaataggacgtgaaactcctagtgagagaaaaggcagaggtgggtttcgaggtaactatctgctgtcaggatttaaagcagaggtagtgaagtcttgctttagggaagaattagtgtttgtgtttaggaccatttataatcagcagacatgcaaaagatcgaaaagcagtttgcttgagcaattttgtttacaatactctttctcagctatctttaattcttgatgatgtaattggaagcttttcacctaaaaccctgaggcaactaaggaccaaacacacttgtgtaatagatgcacttgttaatgacctctgtatttatatgctaaatagggttttaactggggaggggagatagaagccagagtgaaattcagagaataatgcaactgtctaatccacgagtattttccaagcggtgcctacctcagaactatatttattttctttttttctttttctttttctttttttttttgagatggagtttctctcttgtcgtccaggctggagtgcaaaggcaagatctctgctcactgcaatctccacctcccgggttcaagtgattctcctgcctcagccttctgagtaactggcagtacaggcgcacaccaccattcctggctagttttttgtattttcagtagagacagggtttcaccatgttggccggggtggtctcgaactcctgacctcagttgatccacctgtcttggcctcccaaagtgctgggattacaggtgtgaaccactgcgcccgatcagaactgtatttcgctgtttgaaataattagtaaaagctaaggtgtaaattgtgttagatgatgttgacctattcttaattgatgttaaatcatacaacagtcatgctgagtgtctgtcagcaagtaacatcagaaaggagtttatttgaattaatctaagaaattaaatgtaatgataaattatgtcagagtaaagtctataggactgagagtttgagttacattgttagctcagaaatagcaaacaaatcgtcacctgataacttttctggtatgaaaattctctttttcaattggcaaaggggtgacattttataaaataaatgttatctttgatattcccaatacagattttaagaacaccttgcttcattaaattcacaagagaatctggtgttagaaaatctgtgataatgtgtagccagatgaagacacatcactttaaaggaaactgttggttcagcttcttattcaacccaggcattactgtacaaccagggctgacttataacattaacctcaggaaggaaattggttgtttttctaaactttggtctgcaaattaaacagaatttcaagctcttgtctcctgatcccaaactgaccaatggtcaaggggacacagtaccacatcctaaaaaaatgtcacaagaagctctgtaatgtgtttactcgggaaagcactgctcagatgaagcatctgtttcttaatgaggtcatgtttttattttacctaattttccagctgggattatggaggtgcacggtcttgccaggggttgaaaagtgagtcaactgctcacatggaatcagaatctagaatccttgaagaagggaaccatgagctccagtcattggatcatgcatgcttattcaaacacgaatctttacatagatgtgataaaactcttataactcccatttgaaagcattaaacatgaatggtaaatgtggtatcaattatgtaatttggaaggaagaaactctaactttttcaccttataactagctgtgtcaatatccttttgaatccatttcagaattatagcctttaaagtaaaaactgtctaaaaaaacattctagaagcatataaacatcttgagctctggagccagatggattgggttttaatctcactttagcagtatattagttgttgaccttagacgggtttagaaagtaccctgtgtgttagcttcattctctctcttgggtgacccactaatggtacttacctcatggcattttgtaagaattaaatgatataaaacatgcaaagtgattagaatatgtgcttgacatatatcaaaggaccagtgattgttagctaactttattgtcctcattgatattctgggattgttatatacttttacttatgagtattctagtaatcagtgatatatatatatatatatcacacatatatccatatatatatatcacacatatatatatatatggagagagagagagagagagagagagtcttgctgtatcacccaggctggtgtgcagtcatgctatcaaagcccactgaagcctccatctcttgggttcaaatgatcctcataccttctgactagctgggactacaggtgcacaccaccacccttggctaatttatttatttattacttatttatttatttttttactttttgtagagacagggtctcactatgatgccagggcttgtctcaaactgttgggattacaagcatgagccaccacaccagccaacaagctttgatattactagacactctttatgtgggagggaagaggaaacttcctaaacataaaagaaaaaaaatcactcagcaagtgtgtgttagagttactttttatgccaccttcaatttgctggtttccacacatgtgctagataatctataggtttctccctagagaaacatgaattgggattaagtttttaaaaactgacaatagacacaaaatctctcaatattcctcaacatatagcaaaaacttattcccacattttatttgggggccaagaaagacatagtgtggctttcctccaaactgcttgttgattaaagcaatgggtttgcgggaaaatatcaagtttaatcctagtttccttcgaactttacatcttacaacaagcctggacatctgattctgtgtatttggatttggtctgtggtgtttcaagaacctctgcagcttttcaaaatatggccgtgtttaatctaatcatctacagaagcagagtcacacacagatcagcacaaccagggaacaccttttaaccacaccaaaacacaggcggctttgctgttgtgtctcaaccacttcctaagtctcagctgaatatttggtcttgacttgttaagttgcctgagtttagcttaggaagcacactggagtctttcacagtagagagattcacttagtgcattttataattaaccactataaagcaaagcttcggcatgtttgcaaattatggatttcatttgtctaaataaaatcagattgttcctcctagtgtattagaagctggcccaacatcaataaaattattgtttttaaggaccatatgtgcagcaggtgaaatctttattattacaagtcaataataaaagtttgacaagttaaaatataaactcaaaatgtaaacttacactaacttgaaaactttctgcagttcacatttggattgtaaagtggctgtaaacacattcctgcctccactcgaggaacatggatggggactgtgtttttgatagtttgaagtgactttctgaaatgtcttaacaatttagccaacatttacatgcatataacacaagaaggaaagcactttttgactgcctatccagaatcaatgtcaatcaatatccatcttccagaagtctgtattggcatcagttgattagttaccttcaaaatctagcagcttttttgaaagaattagcagaaaaaaagaagtgttctagtttcaaatggtatatgaaaagagtaagttttcataattgttcatttttaacctgtgtcattttgacttcaaataatttaatgccgtgggtagaaatggtgtcagatagagactacagctctgcctctatttaccttatgagttaattatcaaggtaagatttttttttaggtggggggctcactctgtcacccaggctggagtgcagtggtgtaatcatagctcattttatcctctgtctcctgggctcaagcagtcctcccacctcagccttctgagtagctgggactacaggcatgcaccaccatgcccagctattttttctttttaattttttgtagagacagggtctccctatgttgcccaggctgttaatgaactaaaaagaaaattttgattcagtttattcatgcacaaaatagatatgactttctattttaaaccactgtgaagagaaagaggaaacagttgtgcgtttccacgagaacctgtaagtaggttaatggaagagttattcttgctcaaatatatccttttactgcttatagaagaaataaagtagaaaaattatgggaacagcctgggaatctctcctagcttgtgttttgagcacagtaacacattcacactgtttgcataaaggaaattacacattttggaatgaggctagagtaaatttaaaacactggaaaactgagcattcaaaacgtcattttcatcgccatactttgaccatatacacatcttccaaatctagaaagtcacaaatgtctagtaaaaaggaagggggatggtgaaaccccatctctactaaaaatacaaaaatcagccaggtgtggtggttggtgcctgtaatcccagctgcttggggggctgaggcaggagaatctcttgaacctgggaggcagaggttgcagtgagctgagcctgcgccattgcactccagcctgggcaacaagagtgaccctccatctcaaaaaaaaaaaaaaaaaaaaaaaaaaaaaaaaaaaaaaaaaaaattaggaagagagaagattgcaggaattgagaattagaatcgagagcatggttagctcagactgagagcttcacacagcaatccaaaaaatacagcacgggaaacaaaccagcaagctgcattatccaagatcacactggctggaggggcaagactctgtaataatacacagatgatcaggaaatcttttgtcaggctatctttcctaaacgttgaaggcttattttttataacacatgttcataatatttaggcaaaaagtgaaattaaagaataataaagagattagaaaataaactgaatgagaaccagattcttttatgaaagcagaattgaatccatattcccccacttccagaccttaaatagctcagattagttcatatgtaatacaaaagggaagttaaatagagagtgtttgattgggcaatgaattacagggacttctaaagaaataaacaaagatgatccaaccaaaaatttaagtgcacagaagggcataatcatatatcaaagatttaggttttagttttcatacagaagcccacctttctcctacgttgtttccttgtataactatgtctaatattcttgtactattgagaaaagttcttactgtgtgtgtacacacacatgtatatatttagttttaatataacgtttgtgcttatcagcatctggcttcctgcctctcagactgctgcatcagccttgtaacccaagattgccttaggaattcaggagagctgggaaaggtgaccctgcagggctcttcaatcctccctagttaacttgaggtcaaagcatccctgaagaagctgcacttattgccacagtgtttgtcttacagggaaatctcccagatgcagtcaatgtgtgaaaaccaatcactagaaaggaaagaaactgcccttcctttaaggaatgtggaatctttccttttgaagatcaagatttggagcccataatcctgtggatggatgacgccaacattcagctctgctgcttattccccataatttctccgcttgacctgtgacgaatcagcttctgcctttccagggacttagaacctttcttatgggactcctctcactctgaatgatggtgattaattaccagtgtactttaaaagtctcctctatttaattacatcctcctgagtatttggactaattcctcttagtttccggtgcagatcggaatgttgccttgagcaagtctcatgtttctttctcccgcttacgcagtcaagcacatacatagatacgtaataaatattgattaaggttctgtattaggctgtgtttttatcagtaaggattaataggcataaatgagagacatgatccctaccctggagcctaaatggcatgtgttataaagacgctttcaggctgaccagttcttctagtgcagctgagaagacagccatgcctcctcattagcccactttatagggaagaaatggagactcaaagtatctaaatcacttgtctgagataaaacagagaacccagagacagagctgggactccactcagatctttgactactgaagccaaagacgcctaatcaataaaacactgaattattctcagtgatgctattggataattatttacgtttaggttttatatttgtgtttttctgcttaggaggtaagaaacgtgtcaggaacattaatgccatacttaagaactgacatttaactactgaattctgttttactgcggcaatattgtgaattatgcaattacactgtaccttggattagaagttatttaactccccaaagaaaacatagcagttagaaatggatgctttgtgaaaatattctctgcctattaggaatgtaaaaaagtagttttaattcccatttaaaagttataattttaaccttaaaaatcaaaatctgtttaaatcaaaatcttttttgctatagatggcaaaaggtaccataattatcaaaccatgctttgctcccaaaaatgtgatgctgagttgatacatacatttcaaaagcaaatgaactatttagctaaaaagcaaaacataagtacatgtggatataaataacatctactatctaaactctacccaatatattccccaaaataattccctgaaataggcactattatccctatgtttcagatatgaaaactggagctcagagagtttaaataattagaccagtgtgacataggtataaagtaatttagcaaaaattgggctcatttaggactagatgttggaattagacagaaaaaagttagacacaaaaaattgtgtctaattccaacatctagtcctaaatgtactaagccaatttctcatacacctagtaatctaggtcaataattaggaagcacatattctttattttggaaatattttttagcaatcaactcagtcctctatttatagatgtaggatttagatgtgtttcttacaacaaacaaattaggtaagtgacattttaaagcaaaccctgttgagtgtcaggcttggcttcctttccttgctattaagaacaagacagaaatatttaccataagccattgatgacctttgacaggagcctacaattatcactgacaatgaaataaaacatgttaaatttctgtgcaaactgattagccctggatgagccagtactgtctccagtaacttctaagaaggacatctctgcataccaaagttgcctgtgacaaatttcatccaggggtcatttacggatgcttaaaaagatagtaagaaggcagtagcagtagcaaatttctcttgaacttttaaatgacactgtcagaagaaaacatccaccgtgttgctgactttgccttccctgtcgctcgtattagttaaccttaaaagtgcagatataaacaaatttaattcccagtggtacatctgaaccaggagaaatctggaattaattgctaagtattttggttcctgttgcagctgttacaagtgtttgatttggtgagggaaaagaaaaggcgctgcataccgatttcgtgagccacagtgaaggctgcgtggaggccatcgtcttcaatcacagcacagctgcgctctggagaacatatggtcccaacgtctgccattcccagggtgtcacatgaatgatgcccacataaatcctgcccaggagaaagaaagaaatcattaaaatcaatttacatccagaaggagccgccacatagagccacttgcttaccccaaatggcaacagggatatgtttatggtatcacctgttcctctctggaaacgttccaaaggcaaactcaaggcagagactcttctgaactgctctggggcccagaaacacagaaggataatggaactcaattacatttaaaaagatgtcttaggattgtaacttgtctattacaatagcacccgcagctttaacaaagccgtaatgcagatacgtctctgatcaccttcccatatggtcatgcttaggaaagtcctaaaattctgatggaaattcatgctaaatttatcaaaatctggccttataatttgttttctattacaggggcaaactgcagccagacgtctgcagcagagtataaatttattagaaatttggatagaaaactaaattttaattcataatttgaggaaaggtcatcttttactccccaaatgagctgtaatttcataggttgtgtcttctgaaatctgtaccttcttactcataacatttaatgtagcatttctcaacctgaccaatctgcagaaaatatatgtcatatattaattgtgtatacatgaatatatgcatttttctggtaaaaagtcatagtttttcatagatgtcatgtaatcttttaagagattctcaaataggaacatgattccaccccaataatggtgaaaaatgatcaatttagatgaaagggacctcaacaagcctcttgagatatgaaacataaagagaaaatataagccgcaactttttgacatgacagattcataatgataaactttccctttaaatgctatttgagtattaatggacattagcatttcttgtgcttgaccacaattttccatgaaaatttactaacaatgtgctcatttatattcccaaagagcaagatcgtgtttctagtaagccataagttaggaactctaaaaggaaaagttttaaaaatatactaattattgtaaagacaactgtttattggttaaaataataaatgtttctattatacaacaatcatttttgtatgcccaacttccatattctccagcttatatagtaggaactcagcaaacatttgtttcattgagttgtgacctacagtcagatacattatagtgctcccacatctttaatatgctgtatgccagcaggacctcagcaggctccagacaaccagtacaaggcagtgtgactacataaccagtgctacatactcaatggcaacatactcttctaaccctttgctattttgctgcataaaaatcctaccaaggtgaagagtatttagaaactcagctgtattctcttctcttaacttcattctcaggtccttattgtgttctgtttattatgagttcccagctgagataagttacagtgtggccaccaagttactgtagctttagacactggaaatctcagccaagtagccttggttaatcatgtcacaaaaccaacagccttccaaagtttcctgtatatcctcccatgtcatcccatgggatgccaaattacagctgttgagtacaaatcagtagtttttcaaattgaaattggaacacacttttgcataataatcagtctttgagataataatgtagcacaatacatttttaagcccctcccccacaatcatttcactatctctaggaccaaaaacctaggtcatgccttaagggagctgctagacactctaggttatatctgcacacattttttttaaaacaagatttatgtttatatcacaatttggggtatttatctttaaataataaaatccaagaattacattttcccttcttactctataaataagctaagatgaagagccacagcaaagggaaatgaccctcctcttctcgatagagattaaactagattcttaatatctctctgtttactgctaatcaattgctcattagaggccatcaaccctccttgtcatccttgaattggattaaatgcatttggccttttgccacggaaatgtgacaaaattatgaacagaagcacttgttatttttttaaccacactgattaaactccttgactactcagccacactatatatttctgtagctataattatgtaaactggcaacctttccatttcactcacacaatttcaaatcttggcaaacagttacagtttcagcctcaaggcttataatgaacatctgaatttctttgtgaacaatgttcatttcaatgaattaaaactaatgtgcgtcaaattgttaagaatacagcatctcgcattcatgtctactttctgttgatgatttctaacaacatttataggtgtaaaccttatttgaagtttatagaatactttcttaaattcttaaattctgagcaggagtaaagatattattggggcaatagtatatgtgtatatgtgtatacatatatacacatttgctattatatatgtgtatgtatacacacacatatatgtgatacacggatatgtgtgtgtgtctatagatagatggatagatgatagatagatagatagatagatagatagatataatctagacctggaagcaggagatactggagagatgtgaatcacatacaataccatgtaagaggtaaacgaattaaaagttctgacaaaagcttatctgcttgttcagtgtagatctgaaggtaagtgattatctttgtcatatcaaataaggcttgttttatgcaagatcaatatcttatcactactgtgtggacagtaatgcagtggaagatttagtaaaatatgaaggttgcaaaggttgcagagatttatctagtggttttgtggtatggtgttggccaggatacaagactgagacattgtatctaactcagaagtgtattcatggtggtctgcaccaccagcagagattcgataggaaggtcattgacactgtgaccattcaccaggtatgaccttttaggagactataaatatggccaagcttgtgatttatcacagaattttgaagccgtaataatacccaagatctactgggcacttcttggggatgggatgggggacagggagccagtaaaggatgctgccttgagaagcagatgctcagaagatagtgtgaactttgaaaatcccagtgggcagtactgggtggtgaaaatgaaccagtcagacccaaatgtcctaaggtggacaaatcacaggaatcataggatttcttgtcttgactgagagattgttttcacatgcagtgcaaatacgctgagggagggagccagaggcaacacaaatgctgacacaggtagataccatcacagctgcagccacagcagctgaaattaaggaagaacaccttatatcagagttaaataatagcaacttctgtttctatagatcttaccccttggtaagggcaagcatggagctcaagggaagagcacatacacacacacacacaaacgcatgcatatttgttctgtggatctgattcttgattcttgaggagtcctttgcctttctggctacctatccagcagtccccaataataggggttttaattttagatttcagcagagactacattaattggaactgttatgccaacctttacgatgacccattttatacaatctctatccttgtctcttgatacacctaagggataccaaacacacagagcccagatggattagggtcccagagatccagacgtgtttattcctaaaacaattattgtgtgcctacaatctgccagacactgtggaagtgctgacactgtggtaaatagatgaaataagatctgatcctgagctttagggaacatcaggctctaaggagcaaaacagatatgtcaagaacaaagcaaactgtgacttccattatgaacagattgttcagggagaacagaagaggcattgatgaattctccttgagggaatccataaaggtgtctccacggaagtgagtggatctgatagcctgggaggaaggatactctggcaaggaaggactagtggaaacataatggaatgggaaaaggcagagtcttttgggaatgacaagaagtttgttttggctggaacacaggatctgttgagcagagggctagcagggaagctggaaagagagtctgggcccagagttccaagtcaggaagctttctctgacaaatgtgaggtaagaaggggaagaagagatggagcaagttggagacagggagcaggggagtagatgcttgacggagtcattctggtaaagagaaatggaagctggttagagagtgaatggaaggtagattgctttttaattcaatgctgttagtgagaagcactgtgtaaatcatttacatgctttgagacaaagttccctcatcattaacatcaggagtttggtccaggtcatctctagggtttgttccagctacacatgtcctgatattaactaaaagcattccaatttataaagaaattaaagctcaggggcattaaatgctccaaatctcaagtttgtccatactgaagctgaaattcaaacctgtatctaaacactcagaatcctgaacttacttcaccatggttttgttaagtcatcacatacgttattcttgacattaatcttatcttttgtattcataatctacacttgattaagcaaatttctttcttgcagcaaataaagaatatcctggttttctctctatgctgtgttggaaaaactagataatttagaggtatactaaatatatgaaatacactgtgaaagatattccagaaaacaagaaaatggaagcactggataagaaaactggtgacatcattaactcgcctccttctctcacctgtcacatctaattagccactgtaagtcactgtagttgtcctctatttctcatttttttctactattatttcctgcctgaattataacccgagacttctaactggtcccttttcctcctgtaacttccttatctatatgctcaagtcagtcaccttcttagagcacagatcttattagattcctccagtccttcatgtcagccttagcctggcattcaaaacctggcacactacagcctcagtctttctgtctgcctccactgtaccttcctgctccattctgtccactattttgtgcatatctcatgaatattttggcctctgaagctcagcccaagacattccttctgctacaaagaatttttactcacatccacctcttcctaacatttcttgacccaatctatgcctctcaattcctaatgccactgctttagtttagaccaccttgagcctcctcttgaagatttctgaaacagcctgctcacccaggatccagtccactacttagaccagaaggttcatttcagaacacacctctgatcattgctgtcttcctactaatgttcttttcaatgattgccattgcacttaatttacaattaaaacttgtcagcatggtggagtagactgaattgtgtcctctccaaactcatctatttggagatagggcctacaaggaggtaaatgaggttaaatgaggtcatgaggacaggactctaatcagatagggttagtgtccttagaagaagtgatacccaagagtgttcactctgtttctacttgcaggcagtgggaaggctttgtgagtacacagtgagagggtggccatttataggacaggaagagagccctcactagaaatcaaattggctggagccttggtcttggactttctggactccagaactgtgagaagacatacttcggtggttaaatccacccattgtacaatattctgttacggtggcctgagcagactagcagacatagtgtatagttttgtttttccatagttgggttgttattatcttctccaaactaatctattaccatttcccattgaacatgatggtttgctgatgtctgcaatgcctatctcctccttacgtatctggctaactcccactctttcttcaaaattgaactcagatggagtgagcaatcttctaatgcacttccataataccttacaaatacatctactgtaagagccatcatgctgtgcagcaatgaccatttccctgtctgtttccaggaatagattcttaagaaaggggctactttttaaatctctgaatccctccttgcctacgaggagcatattaaaggtttgaataaattagtgataatgcttttagtttagagagcactagacaggactgtcttctctgtctgccatttgttagctgttagtctaagaagtttatctttgtttctcttcacatgaattctgtcaagataattacacaatggttacagattgttgaaatgattaattgtaaaatagtttgtggccatggatagtacataagaaatgctcaatagcagctggctgaatctaaatccaatctatccatcctttgaggaccaattcaattctacatttgcaatgagacctacagaaaggtccataggcagaattaactgttaccttccttttcctttcacagactttgtttatatctcagtatgggatttatcagagttttcctaacagtagtgtgatttccacgtgtatctgtttccactctgctggggatacgcctagtgggcagggagcaggtatttctacctcgctgccttaaactgcctacatgagtctcacacataggaggtgcatgtaggcagatactgcacagattttagatttttcataatatccctcacagtttattgtaaaaatgttaattagagctgcttagtctgctaccagtctccccacttctgagttatttatccttttattgattaggattgacctataggctctgattccttgacaagggttcacttttgactttaaatgagatttcagctcaaatatgtgactgaattagtccaggcagcaagccaataagaaaaagcccatccctctccctcttccaaacttctggtcttcctctactgccccctgttgtcagaatcaagccaggagccacgtggtaaaggagaaatgccgtgtggggagacccggtcccagcaatctaaggcagaatgtacagagttttagctgagacagtgatctatcaactggcatattgatagttaatgaaagggaattatctttttatattgcacaatctcttagttggttcgattttaattcagtgtttcaatctatgaaagagtaaggtttttgctgctttcatgaaggggtggagggatattaaacaatttcctattttgttatcaagcaggtaggcttttgtttctaaagagcaaatggtctaaaaaaaaacgactgtaagagtttgtctttgaagaaattatcttgaaataaaagaggacgtccagaacaaggaaaggattctggaaagcaaagctaaatcctggggagattggatttctactgtttgatggcagaagtggtgtgaattccagcattagtgccatttcagaatgaaaacagcttttatgccaggaaattgactggtgctaactctctctaattagaatagtactggagtgctgggtacagtcctgacagtgaagtgtgatcgtttgataaatgagttactagctctattctgctgacttccagatgcaactttcaaggtggcctcagctagtaaacagaggtagaaaacatatcctcgtacattcgcttcatgcctaaaaaacaagcaatttaggagaagacatctggacctaaatttgagcaggactcagagcccatcaaaacatggatttcatagcttggcgtctggctgctaagcaacgcacttcttacattcaaaacagagttgtaaaagtagaatcttggtgccaactctgggtatttctcattgaaaaggaaatagctctgaaagcttttctttgggccttaagataatctgattttcatgagatggaagacctcagatcatctctcctccagacttctttttttttttcatgctctgaagtattaggcaaagttcactttgcattgtgaaatactctcaaatgaatgctgcataaatgccttgaaatttttttcaaccccctaattagtaacactcttttaaattgggcgcatctattgaaaatacacatgcatttcaaatatttgcttcttgtgaagttagatgtgtatactacagggccaaccacaaatgaaatttgttttcctaaaagtatgcttctgcttggcaaggagaccagagagggcccatgtgaaatattttccatgtgtagactagtttgaaaaatgcatgtccttataatactgacaaaaattaagatggaccattaatttatttgtcccttgctttgtatctatttaaaatatgctgttaagtttcagactttggaaaaatagggacagttaactatccaaacaaaaaacaaattcggaaaaagtaatcgacaaatcattgagaatcactgagtagtttcctgttttctgggaaacaattaggaatgttatggggcaggaggtaggaagtaacagaccttctattaatttttatttattttaaaattatgaaatgtggatttgtgtttaaaaatgaaagtgaactactaaaatgacccactccttggcgcagtatgcttacaaaagtatttcttcctcttcctttagagaacctccttccataaactctccaaagcctccttcttggcatcctcttgtgatgtagcagagcaaggaaccccagacacggaaagttgcttaccaaaaaaaaaaaaaaaaaaaaaaaaaaaaaaaaaaaaaaaaaaaaaagagcttggaaacctaacaagaaatggatagttttacagaacttcattttgcagagaaggctacaaatgaatgttctaccgcttcaaagactaatgttgtgcagaggaattaaaggatggcttccagaaaatcacttaatgaggaaaaaaatgttttccattgtgcacagcactgcgcgctgcttggctctccctaaactgccgccctccagcatctttgtttacatgtggtttacattaatgtccaccctatgaaccacaagtgtttctctactccaaatttatcaacacttttccttcataccaggggtgccttagtaaaaatagaagaattaggtagcgaagctgtgtgattctaaagtctgcaatccatcatttaatttcctatccttgttctgtttgcttcatttcataccatgattttacataatacttcaaagtttgtaatccttaatctattctggatgggtctcaaatacttaaagaatgagctttagaagtcaattcttaccaggcatttaagaggcacaacttaaaactgccaatcagagtcgagttgtgacaactgaggcttagaactatgcgcaagccaggccccaaaccaacccagactttttgtgtaaatgtcacactaacgtagtggtcaaatactgtgtaaatagatactgcgttcctccctgagcctctgagccttaaagatccatttctttgcttccccataaccatctttcttaaaagggggaaatgctgggaaaacatttcttccttctgtcttgactcttcgcccagatcttctgcactggggcttcggaaacatattcatccaaaacccaaacacgcaaacgggatgtgaccctccctaggcggcggagttggcctgggcagtgcttgcgacgcactggtcgactaagcaaaggagttgttaaggaacctcacaagtttgtcctctcatctgattgggtctctgtaccctgctggcccgcccacattccttccttcccaggaactgagattccaaggtggacatgtaagaactccattaggaatccaacctggaaaaagagtccttgagaaagttttctcatcctctgtgtaacagaagggattctagtaaaaaggtgtggacacttacaaaagaaggtcatcggataacagtgagtaccgtgagtgaaccatccagccctttccattaggtgggacaaggttatattttattttcactggaaagaagaagacccatgatcccaaaggcaactttgttttccttccttttccccatttaactgtatcatttccccaagcatccttgtgccttcttatgtttacgttcctatgccacaacacctcagactagatgacatgcagcactactgggtcttcatcatcacctaagcaagtcttggcatttaaggcaaaaatttctgcggggctaacgtgaatacaggagcagagttgaaggctggttggatttcctgcaagaagcagttaaacacatccacagctgcaggaggtttgagggagaagcaaagccaccagcaagattcccttctacctacctcctgatatcagcgctgggacccccgcatcccggctggacctacctcccgagtaaacaggatagctgcatcgtagtgctcctcatggtcatctcccagctggttgtgttggtgctgccacttgcaaaagttcttgagtgtggtggcagcgttcttgctcacttccaggctcttgtccttgtcgcctagcaccaccaccttcaccacggccaggcggatgtggttctcgatgctagcatggctgtacagcctattggcgatggaggccagggtcagcaggtaatgctgcaggccccggccatacaaccgcgccatggacgcgtcagccaccagaagcagctccacctggcgggcccgggagatggagcggcgccgccgccgccaccacgtctgcggtcctgagcccccagcgggcgagagagcggactggtccaagagctgcgaggccagtgctgcgcgtccgctcgggttgctgtgcgccggagcatgctcgtgggcctccggtgtggacgcgggggtttcgcagctggcgcgcggcggcagggcctcgaagctgaagccctcgcgggtgtagacgtgcaggatccgtgcggacccatccccgtacacgcgccccttttcttcctccgcccagggtccgcgcagcagtggctttagggtgtagcgcgcgtgcttgaccgcgaagaagccgtcgagacccccacagaggtcaaagacagccagagagcggggactaccgtccactgtgccccgatagaagcagtggctccggtggcgccagggcgcactcgtcccgcctcctgcgggcacgaagccagcaatgcccaccgaaccatctcgctccaggtccaagaggaacctccggccgcccgcgtagacgaggtagcccaccttgccgccgccggagtagagttggtcgatgttctgcaccagccccttgctcctgcgccgctgcgccagggggtgcgggtggccgggaggctcggctcgctcctgcacctcctccccctgccgccggcggggctgggcggctgctgcagcagtcggaggctgcccggctttatcctgggcaggtgtcgcggcggggccgaccgcggccaggggcaggcggaacgcgcacagcagcagggacgcccacccgagcagcatagtgcgctgcccgcggggaggggctgcgcgactgggactttatgggtatttgttatttgctatgaagttaacggggcgggggatggggacacacacacacttgcttgcaggattgagtcaagtgtcggagggaggggggcccggcagcagcgccagcctgtccgggctgcggtgccagcgtgcgaacttttctttgttgcttgggaaaatgtttggattcgtgctccagaaagaggtggggtggggggggggggaaagaaaagattaaaaaaaaaaagtcggatagtggagattcagcaaatacgggaaaaggaaaaaaacaaaaaccaaaaaaccaccaaatgcaggcacgatcgctgtttcaagaaaagtaaggaaaggtaccgcgcaccgggctggcaactggtgcgcgcagcctcccgcccccgcgctgcgctggacaagccggctgtggaggttccaagctccggggcccacttcctttcttattttgtgggtttccttggctctgctgggaccaggaggaagggaagaaagagaggggaaaaagccgtaaaaattaaaacaaaaatgcaggggggcagcctgaggcgagctggtgaagcggcgtgtctgtgtcccttcggctgcggtctcctcctgcccgccgtcatccccagtcggcagctgcgagcgccgagagcagcgcgagcgctgtgaagatgcgaggaggtggaacaatgaatttatagcggcatgccatcctgcaatggcaatttcaacagttcgtcactgcacgctgcctcttaaagggagagcttcccccaccactcccacccttcccagtccgcgcctaatcagatgggggagggcaaaagaggagggtgatcgaggaaagggagacgaagtaggaggaagggactgggacccggcgaggtggtaggaggggagaggggaaaataaaaagtaatggggcaagaaaaacagatttccttggccacttttaaagccacagcggctccgggtctgtctgatatttcacaaccaattggggttggctaaccttggcttacctcatctcctgaacgggtgttttggttaaagttattgagacgtttcaagtctctccctgcctccttcttgcctgcttttctcgccctcggtgggaagttcctgccgcaagtttttcccctttgcacacccgtgcgctctggcctcgcagaccgtgcaactccatccaccagccagagcttttcagcttcccgtgcgtcccctaaccaccgcgttcccttcgcttcctcccctccgtcccggcacccggtttcctccctccccattctccagcctcttgatgctttgacgctcgccggattcgggctccgggtgactaacttctcccggccaccagcagagcggctggacagccagagagcccagggcgcttcctggcgcgctgcggtaccccggggcgagaacgcccgccgcttgggaactccgcagctttgtgtgcgaacggcgggctcccagctttctccagcacgcctttcgtcagggtccacaatctgtcccttactcccagcccactggaacttcctttgctctaaaaaggcagagcgagaaagagttaactcttagagggaattccgctcattttttttccctgaaagattttaaaattttgcgctcatacttttattttttgcttaaatgatactttaataataaattcctatatctgtttttgtctcttctaaagcaaccacttatcgccataggccttgacctaccttcattctcagaaattccttttagaagaaaaagaatacttttggcggaaggaagattggtgcttattagtacgcgggtgacattatcactgctactcgtttcctctgacctctttgtttcctctaattatcattctaagaagggagaaggaaaacccgacgacttatggttagaaggtctaccttctactgtaggggtaagagctccctccatgcccaaattattcttcaggctaattaactaatgcaccagtgaaaaatgaatgtggtgtaatttgtacatttccatctttttctacgtttaactttggctacgctggggatagcagggcgggtgccttaatggggccccaagctgatcgctttctctgggagggaaccatgagggtccagagcttgatggaggttcttagagtggcaataatcctctggaaggaatttcagaattgcccggcaacaatacccattgccgtgtgcctgggaacaccctctggagtcttgtgaggggcagatgtatcatcttgttttaacttataaataaagaaatcactggggccttagggacacccaacagcccctgatagattctgaaatacatcaggaccagggaggaagttactattgctgaaggccattgctttataattccacaatgcctcagcctctcagtggccagttgacccaggccaatgctaacagctggatgggtcagaataggaggttccagccattttctctatcccaccaaggcctttgagccttgcattagccgttctcttttgtggtccttgctttgcacctacaaatagcaaacttttatctttttaaccagttacagtgaaaaggagtccaatatttggcactaaacaccatttctaatacaaccttgattcaataaatttaacaattttgtcattgttcatgccaaagaatcattttaataggcattttaggtgacagtggttaaaatttgttaattacaattattttcattcacagatagattttgttatttaggatttcaggaaattccaacagattctcttttctttgatggtcttgaactcataacctccagggattctcccacctgatgagacacagtgacggcttgaattttcttcttaatgaagcttttctcctctttcacaaacaccgtgctgaatcctgaatctgaatattatgcctttaagtttaattatatagtgacatttgtactcagtttattcaaatatttaaaaatacatggggagaacaggatagacacagataaagttccaaacatgaatatcaagcacagaatatttactagaggtatatattcacaaggaaataaatactaaatcttatgaatacaatgaataaattcttacatctcagaaaatttctacttcgatataattttttttttagaaagtaacttggacactttggaaacttcatttggtagtatttttaaaacattacactagtggattaggatgagctgctacgttgtggaaaaaattactatctgtcactctaaggaagtaatttgcactggataaaagtagctgaactttttatttttacagtagaaaggaaaaatatattagcaatcatgtttaagcagaataactgctactcattcaaagtaacagttttatttgtgcacatttaatgagaaatttccactgaatttatagagtatatgatcacaaataccatgatagatgattttacatttcctaaaaggaagaaggacttactactccagaatgttataatttatcttggagatcaggtagggcaactttctccatctaactgtgaaaagctgagacccagaggccaaaatggcttgcctgtggataaaaaagtccactagtggccgaatgtcctgaaacctaaatctcccagctcctaatttgggctcattctacaacacttcttacaatgtatccagtttaacaaatatctatcaaggtcctactgcaaagtgctttatgaggctctctggaggcatgagaagatgaacaagtcatgagtaatgtctggaggaaactcacagtttagagatggagccgtttgtataatagatgcacagaatacaaactggaaaatacaaatatagagggggagaaagcaagagaattactcctgcaggtgctctgagccctgtatttccaatatagctccactccataatttgtatactcttttaagtagcattttctcaaatttccatttgctaaagtgtcatttcctaccccccaccccaaactatgattttaatggtaagagtgaggaaatatctgacagtaaaatattcccttccggccaaacacctgctccttacctcccatgtagaagaattacagtctttcaactctgcgtttttctttcccacatcaagatccctaccctaggcctgctgaattggaaacccttttagtatcggcacccttggtggtagcagggtgtgtggattctatgggtaagatctccactactaagctccactactgcgtgggaccatgaatgaatgccttaaagacactgggtgagcttttcccttttgtgacactcgctttgcaaattctcgtttttagagggctttgcttcaaaaccaaaggtcacactttgggagtgattctagctttgatatgaactcttcatttttagagggtgaaactacacttaaatagtccttcttccctccttccccagctctttttccccccgtccatcccctctgatatttacaatggcagaacatggaccctgatgcactaatgcatgtgtacccaatctcatatgcattagtacacacagcacatgtcagcatgcatgtgccacacacgtactcacttgaactcatgtttccctctaggctgcactgatggcttgatagaaatcctaattagagctcagataatagaagaggggattaaaccaaccatcctctgcctttacgaagaaaactttctagagacctgcattgtagagattcttttattttgcccctcgggaaaccttactgaatgcctgataaaactcgaaaccatcttctctgctatctgattaggacatattacaaaacaatctatctattgtgatggataacatatgctttagaatctgttttacttaatattatagaaaatatatttctagaaagccagattttcattttttatacacagtaattttatactatatagaagtcttcaaatgaataatgtacatatgtattatttaagacatacaggtgttatctgtaaagtaaaaccgacaagtcattttttatgctgaccagctgtgaaatgttgttttagcttttctcacacaattatgcacatattacttgcttttatgagttacttgagttctatttttccttattttccaaaaatcatcaaaaatcaaaccttactagaaacacatggaaaatcaggaatttccagcagaaagtaatttgaaacatttgaggttttctttcccttccttcataatggcaaatttcaagcaaagttttcaaattacttaatgagtagtagctgtaattgtagtaggagttgtttctcggttctataattatgtatatatatttttacagttaagattgtatcttaacatcacctttctcaagctctaaaatattatagtcttcctcaaaactatttggtctctccatgttaaatacattcttctggtaaataaggtaagaactggaagtaagttcacataaagctgataaatatcagttggttacagtctcacccctggcaagtagggaaatggaaactgtagcttcttgatcaatgtaattatctcctacccatgatgttggggtcattgcaagttgcttatgtggtcagtggaagaaaacatacagtttcttttttcagactctccatacactattacatacctctctcatacacacctttcctagtcagggactaacaggtggaagagcagttatctgtgttacactcctagacctgggttcaagtaaatacattacaggtttttctcactttatttgacttaggaggtgttgctcttcctacgtctctgcttcttactcttttaaatcaagctggaaagaggaagtgacaatgcactgtcacttactggctgaatgatgatttgattctaagtcccaggaaggaaccctcttccaggaactcaccatcaactctcccccttttctccttccagctggcccaacctggacctgtcggaaacttctccttcaccactatgccccagggtcccaaatgccccaggatcccaaaaagattgccacctctgacctttgaaaatatgagcatgtgagcttgaggcagcaggagaagaggaagtgggctttgactgatttacaattcagggaactaactcttgcccatagcttctagtgtggttctttccaagagccagactaccacttttgctcctctctttttctcatttcaggaccctcttccaatccatctataccctgtccggtttatgttagtgacaaaacaagactcccccatccttcaaggaggtggagcatcagaatcttttcagaataggggtggagaggaaaggattcagttgtggtgccctcatttgtgagactcgagcccttgttcaaaatcatcttctcagataaatccccaccagatctgcccagaaagtttatcagaccctccatggcccatgtcattttggttccaaatgtttcaggtgacttttgaattgcaactgaaaaagttattctgatttttgacattatagagttcattatcgacagctggctataaattactaaatttataattaactatataatccctggcttgtttttttgcacctcaaactcacacttatttctgataagccttaatcaaataggcaattatttcattcatctattagcttagtaggtgtcttcctttctttaggaaattcagatgaggaaaatggtgcagattgaatctaagaaaggtagaggtattaacatagggaaactagccagtatgacacagagaaagcctcttacatatgttgtatagctaaattccagagacgttccggagaatccataaataactttaacaaattgctggttttcagagcattaaagagcaaagtaacctgattagagtctctgctagcttccagccaaccagtttaccttccagaaaatgcaaaacagtgtcttgagattatgagatttttttcccctcttttctatcataagtttcatttttgcttttgattgttggcagtagtctgatggttgggtccctcctacatgagtaaactttttgcatgctaaggataataatgtctcagaattatttttggctaacgtctctttcttctttccacattcttttcttttctttctctttttctttctgtcttcaccatagaatgtatgttctatgaaaccagggaccatgcttgtcttcctcaccacggtatctccagtttctaattcagtaactagcaaattggaggcatacatggacacatgtaaaatatgcaaaacacatatgttaactatttttaaaattatgtatgtgggtggttactgatattttcctgttgctcttctttaccatccttgtctctggtaataaaaacacacctttccaaggaaagtcaatccacatgtttgaataaagctgatggctttccttcagatctggatactggataccgagcctgacaagtcagagtgccccatacatctggccagagctgatggttctgggaagaactctgcccactggacatttgctcaaaccattagctgaaagcacttttcctctgggatcagacaatctaaggatcatgtattaagaaggaaagttgaactgctgtaacaaatacctttaaattctcagtggtttcacataaagtgtattctttgctcctgtcactgtcccctgtgggttgatggccagcacagtagtgatccatgcagtaggagctcaagcttgctctatcctgtagtctttcccctcaactgcctccaaggctgatgcagaaagagaagaaagagagagagatagtagagaaggcacagtctcccttgcttgcctcttcctagaagtagcatacttctggtccattggcagaaatatagtccatatggcagtaatagccctatggccccacccagatgtaaagatggtagtgggaagctgaaaactacaaaccagtagtgagccaagaagaagaaagagggggaaacatctagccagtctctgctgattgccattttatctcacagatcccaccaaatgggaaaagtctaagaatgaagttgaacagagatgagaaagggagaaggcaggaggaagtaaaaaagagaggagagaaaaaggggagataaatcatcacaatcctcgaatccaataatgttaataaaattcttacttttgtttaagtaagtgtaatcagggattttgtcacctaaaacagaaataacctggttaacatactactttgtcctggccatgttatgtctagcccctagctcagtcctttgcatatatattagataatctaagtatttttggtatcaacgagcataagaatgaatacttaatattaagacattgagttaaaactgtgtatagttattggtgcgatcgatgttaactaacaagcttatctcttacattattcctaaaagttgtagtctcaggtaactaataagtgtgcaacatttattctattattgtagttcctgtttttctgttctgtcacttacctatgaatgtcacttacctgctggtctatgtaaaaattgtcagtgccttttatctgggtgggtatactaaatataaaatgtttacattcgtaattaatcaaaaccaagacttccattgtaattctattattctaagcttgcctagtcttactaaataccgtaattatctgtaaaatcctggaatgtaaggacattaaccttcctccagtgtttattctgaagaaatgtttggctagccttcctcatctcactgcgtgaccttgcagtatagaaaaataccaatcatcgtggctcttaaacagttagaactaactgcctagctgaacatcataacaaaattcttctaccaaacgacaaggcatggaaggagaacactccccgtgtgctaactttctttatggtcgagcacaccctgccaaaacaagcagccaaaaggcctgactttatgtcctagcctaggcactgtatgggatcctggggaagttatttagatactttgtgtacttttttcctcatctgcaaaagagtgacaattataacacatgcctcattgggtttttatgaaggttagcaaggttaagaatttgaattggtgtgcaatacctagtacatggcaaataaataataaatgtattattgttattttaaattacccactatagcagttaagggttttgttttaactctttcattttcacttaaattttgcctcagagattacctctgactttgttctgatagaagcttttggaagagaatcactaaggctgcgagcaataaagaagtttaagacatttcagttactaaggctggagaaaagtctgatgcaaataagtagaaaatccaaaaaggtgtataaagatgcacaacttctatgtggactacatatagagaagacttttaagaaacagtgcatcctttccattcatgtccttttgtgtttatagtccctgatagtgttaaagccatttgtgtgcttatttttctgttgctcctgtcacatgccaggctgccatcacacagagcatgaggactccatctacacacatggcacctccggtgcctagcacaacatcggactttacaattttttgacaaacattggcttaattgatttcaattaaatcaatctcatatagtcccatagagtttaggtgaggagagagaaaactatatatatatatatatatatatatatatgtgtgtgtgtgtatatatatacatatatacgtgtatatatatatatatacgtgtatatatatacatatatacgtgtatatatatatacgtgtatatatatacatatatacgtgtatatatatatacgtgtatatatatacatatatacatatatacgtgtatatatatacatatatacatatatacgtgtatatatatacatatatacatatatacgtgtatatatatacatatatacatatatacgtgtatatatatacatatatacatatatgtatatatatataattttaaaaaatctttaagttaaagaaaaagaattatagcttaagaaagtaatcatgactatctataacttagtttaatagaaacttttgtgttctagagcaccacacctcaaagaaaactcaggtattgatatggtttggctgtgtccccatccaaatctcatcttgaattgtaatccgaattgtaatccccatgtgtcgagggagggacttggggggaggtgattggatcatggggccgtttccttcatggtgttcttttgatagtgagtgagttctcagaagatctgatggtttaaaagtgtgtggcttcctttgctgttcctctctcctgctgccatgaaagatgggccttgcttcaacttggccttcttgtgattgcaaacttgggattgcaaatttcctgaggtctccccagccatgcggagctgtgagtcaattaaacctctttccttcacaaaatacccagtctcaggtaatatctttatagcagtgtgagaacagactaatacaggtagttacaaatggtattggttgcttttaacttgagggaagaatcaatgactctcatctttcccatcacataatgtaatatttgacccttaggattagtgtatatggtattcacattttcaatctctgagaggtttcctgaagaacttagatggatagtacatagcaattcataatttgaaatgtgatcagcctatgcagttgcatggcatttcttgttctgcgttttgttggtttgtttgtcttggtttgaatactcattgttacatagcaagcagctaaggtaaagagattaaagcaaaagctgaagccacaactctgtttcttttagagaaatgctcctcctaaaaaggttagctattattgttggtggtggaagtgatgagaacataaataagtgcaagacagttgtgttttaagacagaaagtagaacagatagatttaaaaagggaattcagtaatggctcaaatctaccaagggaataatctcaattatgctgccctcaggtagaggaaaaggtggtagatgagatagccccttccaggcagttcatccattgcagaattcactcatcaataaatgcttgggagaagttgtaaaatggtcaaatgtgttattacacacaaaacaacacatctgtgagtttccattaaaatgaggttgaagaaagggagtcaagagtgcaaacatttcaacaaagctacaggtggtgaaggcaagttgtaggcagctaaactaggcacacctgtagtaaatgttgcttttaaacttccagaaacattttatagtttttgccacatgtgaggtcaacaaatgcattgtttgacttactgccccacttgtgttctcttgacgggaagaaactcctagaagagaaataatatgtttaataaagaaaatactggcctatgttagaagaaaatactttcccaaatattcatccatgagatgggtaagaaaacacgatgatttaaggaagccaaggataaattgactcatctacttttgtggcaatgcagcatattttgggattaagactcacttgttttcctgttctgccatttcccagtattaaggaacttgaataggaactggctgaatgtttattgacattccattaaaaagagcataagacacagccagatttttttttccttcaaaaatgtccacaagtacattgagctaaggtggtattttaaaacgtgggttctcagtattttcttgacatatctgtaagagtaggagagcgtactttctctttctttgtatgtctattgaccaaggaaaaacaaacttccatactctagaaagcggtgaatctcaaatattttggggcccttttatccctttaaaaattctcaaaaacctacaaaacgtttgtttatgtaggttatatctactaatatttaccacaatagaaattacaactaaaaaaagaaatatttgttaataacaataccacaactatgatatgctaacgtaggtaacatttttatgataaggaatcatattctccaaaacaaaaaaaaatagtgaaacaaatggtgttgttttatatattgacaagtttctttaaagaagatagctggattctaatatcttgtcctgtatttaatcattttaacatcacatgtaccctccaggaaactccactgtaatatctctgtattattataagaactttttttttttttttaatcttggggctttcctgaaaaagcttcacaaatcttgctctagaaactcgctactcaaaaccagcatctgcatgacctagagctggtaagaaatgcaaaatctcaggttagaccccagacctactggatttgcagtttcacacaacttccagataattatcgtatgcattagtaaatagaaggatgctgttactttgttttcattgcttactgacttctccccagggaaaaagtggatcaactttttccacttcggtgacatgattggtggaatgaaaaggtagacaaatgttggcctacatttcccagttgaatgtaattaatttggcaaaaatcactgggtgtatgtggcctttttgtgtgttgaggtggttggagggtgggatggatcctctgtgcttaaagtttcatgtagcaaacctgctaaatgtcgtgctcttcccatagcaggtcccaaggctaaccaaggaagtcagaaggatagagaatcaagttaaagcaccatccttcaattaagctttaccaattatattttgatctgtatcctgtttctaagctggttcagaaagggagaagactgtgataatttactattcccacatatctctaaacctagcaaatgtcttccgcacaatgcctagcccagtcagtgcatgtacccattatgtgttgctgctgctattggatgtagaaaaatagactagaacttaatattggttcaattattctttttctttttttctgagacaaggtctcactctgttactcagggtggtgtgtagtggtgcaattacagttcactgcagctttgactcctgggctcaagcgatcctcccaccttagcctacagaatagctgggactacaagcacatgccaccacatctgcctatttttttttattttgttgtagagatggggtctcattatgttgccccaggctggtttggaactcctaggctcaagtgatcttcctgccttggactcccaaagtgctgagatttaggtgcaagccacggtacccagaccaattattcttttactttgaaaaaaatagactgtaaatatttttacaagattagatattaacagctaggatccacaaagcacataaagtttatacttttacacctaagttacaattaaaaatatataaacttacattttaaatttatatttatgcatgtttacatccctctactcaagcatgcagtgaatatgggtaacataaaatatgaaaagagaaaaatagaaaaacgcattctctaaagcctatctctttagatcagaaacagaaactcaaagttttgagatgagaggctttctggactctgcgataagcaggcaatggcatctaagtgtttggcccctgtgtgctaatagaggcaaaaaaaaaaaaataataaaaaataaaaaaaacccaactatatcacaataaatggagacctaaagtctgtctcattagttaaagctcaaacttaaatcttactactgatccctagattatggtagcaggcttaggaaaatggcaactaactgttacctgcaacaatgttttgtagcaagctatggtccgggtcagtaacagaaccaagctcggaaaccataaactgaaccaagaaacctggtggactagtgaatacttctgtgatatccctagtgtctcctctggcaggagcgctgaaatcatgaagtgttaggctgttagagctagtgactgctaaacagagatgggtaagtacagaggaaaattttaaaaaaattcccatctaagtgcacaaatgatattacacagaaatcaaatgctaaaattacagccaacaaaatcaaaattcaaaatataaatataatttcagtggaggttgacaaaaattttaagtgaagtttctgaggatgtttgaagagataaatgaagaaataagtttgattaaaaagaatagaatatttggtaaaatgaaggtaaaatataaagtaagagggccaggcgcagtggctcacgcctgtaatcccagcactttgagaggctgaggcgggcggatcacaaggtcaggagatcaagaccatcctggctaacacagtgaaaccccgtctctactaaaaatacaaaaaattagctgggcgtggtggcgggtgtctgtagtcccagctactcgggaggctgaggcaggagaatggcgtgaacctgggaggcacagcttgcagtgatccgagatagcaccactgcactccagcctgggtgacagagcaagactccatctcaaaaaaaaaaaaaaaaaaaaaaaaagtaagaggaagtaataaactcgaaatcttgaaagtaaaaaatatatatttaaaaaacataaaactattttaatggattccgtaaatggtgcatacatttgaagggaattagtgatttggaggaaggtaccttcatctaaagttcttcataatagagacacaaaaggccaggtaaatggtgtataggttaataaggagggtagcaatagaataagggaatgaaaggaatgatagaaaagcatatatgaatagaaaatatttgataattttccagaattcattagatcaaaactttactctgaatgaaaaatgaataaaaataattttaatttagactcatcgtgttgaattttactaacaagagggataattcatttatcttaatggtttctagattgaggagaaatccaaattaatacattttaggcaaatttttttatcagcaaaagtagataacagaaaacagtatattcatatctttaaaggactgaaaatttaaacttaaatttttatacccagctatattatttttcaaaaatgaagacaaaatattctttaaacatttttcagaactaagaaattttactatcaattaataggcctttataaaggaattgttaaaaaataaaatttagcaagaaggaaggccagcacagagggaagatgatgaatgcaaaattgataaaatatgttgataaatatattgaattttgatatagaggtaaaacagcccagcttgtgtgctttttcttattttgttcaaggtaataagatgggagaaattatgagctttaatatagaagctatcctgaaaaagcttctaatggccaaagatggaacaatttgaagagcaaaataaatgacgtagtgtaggattgtaactcaaagcaaaaaataaataaacatctataagtccatattgatatgaacacattattaaacaaataaaagaaagaaaagatacaaatcttccatacagaagaatactacataacatgttaacactccctttcttaaggagttagtgcttagctctctgtctcttgaaaatgggttacacttaataacctgcttccaatgaatacagtgtggaaggggagaaaagtgtcttcacaatagaaaaatcctgccaacactaccttgccaggggatcgagattaactacatcactgataattaatgtggatagtatgtaactgtcatatgatatgatgaaaatgacacttcatctctactgtcttcctttttaaaaactttagtcaaatcatgagaaaaccacactgagaaaatgggggagaggggggctaatgttgctggaaatttaggaaggaataaaaagaggggagagttatgaggggcccagaaggctttttagtgaaattgaaatgtaaatatacgaaaataaaatgagggaaaatgaaggccagattcagatccaactggacggacagaaagaactagtgagcttttaaagctttaacaatgaaaagagacagaaaattgtcaagtaatgtgtggcaatatccagacaggatttaactttaaaaagtgagaactcctggacaagttgaagggaaagagaaacagattttgtgaatggtgatgctgttttggaaaatttggttttctaaaccaagtttgagtgcctataccatgggacagaactcaggctaagtaggtaggataaggctccctcgtttatgatttatacatgacgttgatgggaaatggttcccttttttaatttctattttttaagagcaatccatcatctacaatgttgtatagaaggcaagtctacataatctaaacatagggtggccatgggagtctcagattccagatctcagttttctccaaagaggaggcttggaagagaagattttaccagatacaggtgtggtaagagggaattcctagaaagtactgaaagcaagagttgaggactatgtactttgcatcaaagggatcactcttaaatgaattttctcatgctctagtaaattcaatgaggcacttgtcttaactacaggtggttcccacttacggcaatttgacttataatgagtcataggctcagtgctctgccagttactcagagccctggcagaaggccacacacagctacatcattggcactgtcttctttctgacaggcaccaatatttaagacccttttgcctgggtccttgactttagatgacctcttaaaagccttgcagcttcctcggtgtgggttctctatggtacttgttttcaaacattcctgctaacaatcaataataacaatgtagaatatattatataaagctttgctacttacccttgtggacatattctttcattctgtactaacatcaatagccaagtatctattgagcacttactatgtgacagtcactatagcagtcactttaaatagatgagtgtatttaatcccctaagagacctatgaggaggacattattaattgtattttgcttaaaaatgctgatatggtttggctgtgtcctcacccaaatctcattttgaaatgtagctcctctaatccccacgtgtcgtgggaggaacccagttggtggtaattaaatcatggaggcagttacccccatgctgttctcgcgatagtgagtgagttcttatgagatctgatggttttataagaggcttttcccgctttgctcggcgtttttctctcctgccaccgtgtgaagaaggtgtttccttccgctccaccatgattgtaagtttcctgaggcctccccagccatgaagaactgtgagtgaatgaaacctcttttctttataaattacgcagtcttgggcagttctttatagcagcatgagaaatgactaatacagggaaatttaggtttgaaaatgatgtctgacttgggtaaaggcaaagagctggtatgtgggagagctgggactaatatctaagtttcctgattccaaatacagttccttttttactgtacaattttgctcctcctcaggaagaccctttattgttaattttcagctacaagtccttctaccagttatactttcaatcatatttgtgtcttattattgcatttgttcaagtatattagcttctatgtatgtaaaaacctttataccatacagtgtataagtttatgctttaatgacaaataattttgataggctgtgattatttcatttacaaattgagcatcaggctgttgattaggaaataatcccttattatgacattgtacctgtaagaaaactaaagtcgacttgagtcatttcatttatagcttgagtaattagctttacattcaagcactgtcttagaatgatctaggaaaagaatagagggcaaggtctgaaagagaaatatcatcttcacttttgatttttgggtatagaaagtatgacattaacttgaaagagactaagacatctagctattttcttgtactttgaaactgccctcatcaaggacaactcttaattctgatagggtatcattctgaggtgtgagtgggctgtattttgagttcagcttactgttcaccaaaaattctcagagattcttattaccttggtgaattttcatggtctaaggtctggtcattagtcttgaagataagaaactgggcctttcatctccccagctcacccactgtttttctgctgacaaccctccttgatatgcactttctttggcatattaaatttgctgataaagtcagcagctcctttagtcctggaaaacatttttgtaccctctcattttgtgttgagtccaataaccagcaggggataaccttttatcctggctagtagtaagatgtaatatatataaacatagaaatgtatgtgcttctccctttccccaccactgagttctttctttttaaaaacccttaaaatattttcaaaaatagaataaattacaaaagaaattgtttatcttaaagagtcagtagtaaattttgagttatgtaacatggaaaaaagttgaggaaaacatggtaattacctataataacactttagttgttaagcaatgatagtttttacatattttttccagccttcaattttacaattttgttaattgtattttttatcacctagaatttaaaaaaggctaaaaggcttaaagtgaacaaataatgtccccaggcacctccagacccactagttttattcctcagaagtaacatttccattttcaaagtgttttagctatttcttttgatatttattttcatattatgaggtgtatgttaataatgtgctttctttatcagttttagtcatcacccagttacttctcacagtagccaaagactgatcttatatacccttcccactcgtttcttttccctatatatacccaatatagataaataaaatgtttgggaaaaaacagtagtgtgcagaagtcctgttttttcaataacaaggagcaagggtactagttgagagtgaaggaaattcgaggtctgaggtaagaggagaataagaggaaggatggtctgggagtaagagaataaattggttaatgattcatttcagtatgttcttgagaaagaaagacaattaatacatgtgatcaatctcatatgcttaaagaacaacaaaaatcacaaaaatttattcacaaaacatgcatataattaaatgttatgagtttttatttagcttaaatatgatggtcaatggtataccatggttaaaaataaataaaggcactttgaattccagagatgtaacatctctagttgaagcgtgtatgtatgcccttagctacctgctttaaaccaatcaaagaaaatatctataaatatgctaagctttcattacaatagaaaaaatttttgcccaaagaactaaatcttggtcaaaagaaacaaaaatgtgtcgattatttagggattttaagcagcatgttcatgaggtagcttgttttgctaagaatagcatgactttggggttgaagagtctcgtgtttggtttgaatctcaattctgccagtaaaatccctcatctattaaaatatctacaataatacttttgtcatttattaaaatgaggaaattaccagttttcatatttattacaataactgttcctttgctgcaatgttgggtggagtagaagtcatttttacacagtacccagtacattgtaggcctttaataattagaaattgctctgccatagaattacaccatagcaattctatggagcatccattggaggaaatgcatatggcatgctatctgtatttaaatccaaagcatttcaaagtcaatcaattaaaggttacatttttcatttctgttcaaggcaatattaacattggtattggtaactgattaacaacttattttaacagtttcacatttttcacttccatgtttaccatcctcctgtgtccagactacaacctcttcacccaccatctctcctttccacactgcctgcccagtcagaaaacaaaacaaaacacaaaagttccacacttccagagtgacttgtttctctcctcaccctccttgcattgcttgacctccttctggtcctggaatcactccaagctgaacatcattaacccagagctcggacaaattaggtagatagaaatatttatcaagtgaatgaatgaatcgtacaaagagcccacaagtccccctatcattcttttttcagttaatgacattagtattcattcatctgctgaattaagaagccttggattcattctcattcctgacatatatttgatcagcaagtcctggcagtttgacttcagaaataactcttaaattcatattctttccgtcacctctgtcttataatctcccccgggatgttgccattggttttttaactggtctcctggtctctgcctgaccccacactagtttcttctctatatgtcttctaaggtgaacactataacatataaacaaaatcatatctcatgaacccctattggcttactgcattaaagatcttgagagttccccatttcttacatataagttcaaattccttaggaccacacaaaaagtcatccacaataaggtcccaggttacctcttaaacttcattactagccttcctttcgcttatcccctactccactcaaataggcctgttccacattgtgaacacctgttactatttgattgcctctgcacctttgtgctatctatctaatcaccttctttctcttacttatctggataagatgaatttaatctgcaagtacagctgaaaaaatttttgtgacatgaccttgactcaaggagaaagcagtctttccttttttgttaatgattcatttcattaacaccattaatgttgtttttgtaaaggatttttattatttctgacatgtctgtgaaccctacaagactgtgatcatctctgtgaagggattcctgtcttttctttgtacctgtattaattttccatgtcttctttaacaaattatcacacacttggtggcttaaaaaaaaaaaaaaaaaaaaaaagaagacatttgttctcttctagtactggaggccaagggtttaaaattagtatctttaggccaacagcaagtcatcagcagggccatgctccctcaggaggcttcaggggagaatctaataaacattccttctcttcctggtggttacaggcacctcttgacttgtagctgcatcaatccattatttcccttcgaggtcacattgccttctcctctcttgtcaaatctttctctgtctccttatgaggatgcatgtgatggtatttaggacccaagcaaataatcaaggataatctctttatctcaagacccttaaattaatacctctgcaagtacctttcctcccctccccccacaaataaggcaacagttacaggttcttgattcctttgaggaccaccattcaatctactacagtttaccctctggcctccaaagtttcatgtccatctcacatgcaaaatacactcaaaccatttcatcatttctgaaagtctcaacccattacagcatcaactcaagcccaaaatttcatttaaacatgtctgattaaaagcccaaacctcatcaccttaatcatctaaatcaggaatagatgagactgtgggtataattcaaccaaaggcaaaaaactcaccatctgtggacctgtaaaactagaaaacaagttatctactcacaaaatacaatggtgagacagaagtataacagttatagaaattcctattccaaaaaggagacaatggaaggaagaaaggggttactgattccaagcaactttgaaatccagcaggacaaattaattgggtttcaaaacctgggaattattctcagtggctcaaggccctggcctctgcttttgaagttgtgcttgctttttattgaagggtagtgcatgcctgaaactgagtagtttcatcatcctgttacctgcttctagagctttggaagtctgacaatcttctttcatttgcctgtctctgttactttcaagacaagctcacagtgtttttgctgcaataacactctcaaaaatgttgtggctctcctgtgtatgttatggaattccttcaattagaccaaatgatcctccaaagagctttcctagttaattctgtctctgtttttgtcttctgctgagatgacctggtagatccatgagtcatatgccaaacctctttagtaccagcaaaaggttgtccagccacacttttgatcttctctccagagcaccctttcctaatgagtgaatcaccaaattttagcatttttgtttccaatctggataggctgagaatttacccataattaaatgtagattcttttttccttaattgttctttttttcactctacctctttccaccctcattttactatcagcagaaagaagcaattgagctgcactttcaacattttgcttgaaatttcctcagttatatagccaaattcattgctttacaagtcttgctttccacacaactatagggcacaattcagttaacaagctgccactgtataacaagaattaccattcctccagtttccaataacatgttcttcattttttcctgaatcttaccagaagtgtttttaaaatccatatttctacaaaaagtctatttaaggcaatctagatcttttctatcctgtgtctcaaaatccatcaagcctctactcattactcagtttcaaagccacctccacatatttacttgttatattggcatcctataccctacctgctggtaccaaaatctatattgttaaatttctaccagagaaacagaatgaatggtttgaataggttctgttttctttctttctttctttctctctctctctttctttctttctttctttctttctttctttctttctttctttctttctttcttttctctttcttctcttctttctttcattatcatctaatctacctatctatagctatctattcaaatataaatatagacaaagatatatatatagatacattaagagatttgttgcaagaaactggtgtatgcaattatggaaactggtgaagtagatagaaaatccatagggcgggccatcaggaaagccaggctgtaagtcttaagcacaatctgaagctgcagtccacaggcaggatttcttggtcaagtatgtctcagttctgctctcaggccttttaaatggatgaaaaataatccatctgaattatctaggatatcttctgtactttgtagacacctaattattattattttttaaaagactgggtcttgctctattgctcaggctggagtgcagtggtgcgatcatggctcactgcagcctcaacctcttgggctcaagtgattctcccacttcagccttctgggtagctgggactacaggtgtaccaccacacccagctaatttttttatatatttgttttttgtagagatggagtctcactgtgttgcccaggctggtcttgagtcctggctcaagtgatcctcccacctcagcctcccaaagtgctaggattacaggcatgagtcatgatggctggcctaattacagatgttagtcacatctacaaaatgcctttacaacaacacctacatctgtttgattgactaactgcagactggggattgtagtcaagctgacacataaaactgattgtcacagtattctagtggttaggacaggttctggtacatcgtaggccttcgcttcatttatgcaaataaataagtgatgtcccactttataagctatacttctgctatacttgactctctgtggagcttgaattctatggttagtttcttaaataatgccattgtgaacacatttagccattcctcaacaaggggtcagccccactgtgcatttttaccactcctgatcataggtattagtcatgataccaagaacatttgcatagaaaaatcatagttaagaagggaaagaagtctatattgagtctctagtttttaaaaggtacttttcataaacgtttcaaaggatttattgttttgaatccattatttaaaagcttatttatttaaataatcttatgagtgtatttgagattagtttttccctcttattaattactattctatatacttactatatttgttcctttttctctacctcccttccagaatcatgaatatgagaagttatctagtggtagcaagtttctacacacagtttaccaagctctcctagaaaatttccaaaaagtcaaactaaagttaaatccttaaattcccagagatgtgaactcttcttaatatactgaaatactgcaagtattccacataagtttattacctcattaaagtggaaatccctactctacatttttaaccactttgaaaatcaaaatgatatgttagtattttgtagttttcacattttccacgaattaccaaagattacctatagagacttggctcattctctgcaattttgttcaagttcctacaatataactcagcaggcccagacactaaagcatattaaaaaattaatatctgtatctataatcccagcattttgggaggctgaggcgagcagatcatttgaggtcaggagttcgagaccagcctggtcaacatggtgaaaccccgtctctaccaaaaatacaaaatttagctgtgggtggggttacatgcttataatcccagctactcgggagtttgagtcaggagaatcgcttgagcctgggaggcggagattgcagtgagcagatatcgtgccactgcactccagcttgggcaacagagtaagactttctcaaaacaaaaataatcatattatccttgctcttttttcactaatttgaggcttcaattttaactaaatgattcatctgtgtttgaaagttactcttttgacagagaaaataaaaataatatataagattgttgaatctcagctcttaaacttatacacatcaacgatgtatctcctctattttgtttgggtctttcttagactttaaacagttgctgaatgaatgataaatttttactgttcttagcgtttctcaaaagcctcagttttgtactgtttcttcagtagtttcaattgttatttgtctctagtaaccactacttttctttcttgtgtttttttttggggggtggtgggggggtagcggggaacggaatctcgttcctttgcctaggctggagtgcagtggcatgatcacagtctcagctcactacaacctctgcccacctggttcaagtgattctcctgcttcagcctcctgagtagctgggattacaggcacccgccaccatgcccggctaatttttgtatttttagtagacggagtttcgcaatgttggccaggctggtctcgaactcctgaccttaggtaatctgccagccttggcctccctaactgctgggattcaagtcatgagccaccgtgctcggcctcttttgtgtttctgatttgcaactatacatgtacccaggagctcttagcccagatgtgtagattgcctgaagcatatgaacatttttcttctccatgggcacaatttttaattacatacttagaatttcacttgcgatacaccccagtgttggttcgtggctgggattcttaatattccatcttaatattccctcccttgcagaatttttattcatgcgatcatctttgtgcttttttctcaatttcttgaaatcctggttattaactctagaatttatgtttgatagggtcagatgccaggcagtatggatataccaaattgttaaaatgtatttcaagttgagtcaacaacccagggaattgttgagcttgtttggtgtgaaaatttgagtcaggtacattctgtggaatattttaatctgagtttccgttaaattgattggaaaaatgccaaaccatgtgttattcgtaatttgtttttccaccctgcctcctccactgttacccacattcacctgaccgtaaaaggccttttaactaggacgaacccatccatgttttggttcctcaaatgtttcaagttatttttccaactgttggggtttggcaaactcttgtcagctttttgccaaggtggttatttttttcttttaaattttcaaacctgagtgtgttttctggaaatgtagtccatatgtttcttatttttttatatataactcataaaaatagtttttaataattattttatgttcacaatatctgtatgctattccgtatcggtctcttagtccatccaggaatgttccaccttttgtcttttaacttaggtgaaaaattttgaaccaaatctgaaacttgataggccagtacattgaacggttggcaaaatttatttttcatttctctcattacctttaatagaaacaaatagtgtcccttttgcctaattcaacaaaaagtcaggtcagctcaaataactaacaaggaacacatgcaaatagtatgttagaaatcaatggggaatgagttatttatattgtatctataattgctagacccttttattttggaaatcttctcctttccactcccagacagactttttttccagagacaatcataatactaattctcaagtagaacacatttgaattcttttcattttttagcataaaccaaaaatgttcagttgaatttaaatcttgatgtctaaagtcactggcacttgtactaaattttgacttgttttcgtgtttcatcttaacttatcttacctccatcagcttacctactgtctgaagtgtgttctccctgagtctgccccagcacatcaccgcactagtgctgccattgccctcaccattaccctacagatctctttccttgcttccacctctctctgcctctaatccagccttcacactgctacctgtgaggctgaaggattgtattaggtgctttatctgactccctgagttaattatttttaatccaaaagataggtaaatagatttaaatttctgcaagcataagaaaatcattggtatccagtgatcactgctcaatttcagtttgcatatatgttcagatttttaaggaacaaaatcaaatccatttaattgcaataaaatacaaatataaccctagaagtcgagctcaggggtaaatgttagctacttttacaatttcatagagaagcatggtattgtctatcagtcagtgagccaggaggaaacaggtaatacatttaaatgatgatcattccagaaggctttaatgaaggaactgttggcaaatgtgtgggcatagtgtgggggaatcaagggttggtgcagggtaatgagagataatgacagtgacaaaagttgggcacagcaggaaaagaggctgaatcagttttcaggaccctgaaaagagtctgtagaaagggacacatggaaaggagcaatgacctttggttgaagaatgcagccagcctgaggcaaccccacaagaagatggctttggaggcaaataaattcacttgcctcctcttttttgaccaaatgcaacagaagccagaagacaatgatgtccgctaatatacagatgttcctcaagttacaatggggatacatcctgataaacccacagtaacttgaaaatatcataagttgaaaatgtattcaatacacctaacctactgaacatcatagcttagactagcctaccttaaacatgttcagaacacttacattagcttacagttgggcatattcacctctattttataatatagtgttatctcatgattgctacccttgagtgtacgtggctgactggcagctgcagctcccggccactgcccagcattgcggaagagtatcttccccaacttctccagcccaggaaaagatcacaattcaaaattccaaccacatttctactgagtgtgtatccttttgtgctattgtaaaatcaaaacatcttaagtcaaactatcattagggccccttctgtcgtccacacaggtcagctttccaagagagaaggcagggtggaaaaggatgggaaatggatttggagggtctaacagaaatttatctgggacatattgcaagggccaccaaagacttgtacagtgaagctacaaaggagacacagtgtttactatactcacttgactagatagttctaggtaccttcaacagctttataattcatttgcttttgataattgtctctggtgttgctggttgacatcttctattgcatatggacaatgatcatctataatgtcaggataatcgcaggcctctaattaaaaatgaggaacataatattctgtgactataagcctgggaaggattatcctgctcaagcacatggccttcaaagaatatactgtacagtcgcccctggtatccaaggcagactggttccaggacctccatggataccaaaatgtgtggatgctcaagtcccttagtcagccctgtggaacccgtggatacaaaaagctggttctctgtattggggttgggggattgtttcacatcccccaaatactgaactgtgttctccatctgcagttggttgaatcccaggaggcagaacccatggatacagaaagctgactgtattcaatttttgcactagattgtatcaagtttccttggactattcagatccaatttctggggccatcacacatgccctgatcttgcctaacccttcagagagcctcttctgatggaaggagcatgggtgaaggagttaacaacagacaggtgaaaattttggttttggttcttagaaaagccatttaaccttgcttaagatttattaatgggttccagccacaggcattctgacttggtaggtacaggatggtttctggttgttcatgtctttttgtaaagttccacaagtgattttcatgtgtggtaggaccgttaatatgcagagttcgataaagtggaagtgattgctttgagggttacataacactccctgcctcttagccactgtagctttttgttgaaatattgagtggccttattcacatttatgagtttttgtgagaaccatgcgctgctaaagagataagacaggctactggcatcagacagatttaaaggtctgaatatactctcccttacatcatttccagactgtgttccgtaaaactctaggtctcaacaaaaatgcttctgattttttaataaatgtttgatttaaatttcatttttatttattattgacaaaaatttatatattatatatttacagtgtacattgtatgtatgtgtgtatatgtatgtgtgtatatgtgtatatgtatatttttatatgtatggttatatatatacataaatatatatagtgtatatataagtacaaatatacatgtttaatggttcagagccctcaatagacaatgccattatgctcaaattcagctaaatattgacccattggaataaccagcacattaacttgaactttatagtgtatcttttttgggggagcgggtggaagtggagtgggggaaggtcaatcttagaagaaatatttttctgtaatatttaaatgtctaataaatatataattgaaataaaagtattaattttgcattatttttaaattatccagtctaatgcatatctgcaaaagtaaaataatactagaaaatgtactctttccatacctgtcattagggtaaagattaaggtcatctactcagtgaaagatgttaatttcacttgtgaagtaacaactaatgtcattatatctcattgggatgatttgttagctatatcaagcacttgctataggtaaagcatgacagccttgtttttaagtaattcaactttgaaacaaaattgctcactgcaacgtttttaaaatatttgaattggcttagcctgtcctgagattgcaaagagagacactgaatgactggtgtcattataattgcttatttatgtatgtctgcttttcttagagaaataaaatatttgcaaggttgatatggaaacagacaagcataatgcatacttaaaaatttttttaataaatttttaaaaattaaaaaaataaatacttttttattttaaattaaattttaaagaataaatttaaaaaaatttaaaaaagtgtcggtattttcttagagaaataaaatatttaccaaggttgatgtggaaacaaacaagcataatctatacttagttttaaaaaattattcagcagagcttcattttctgaatgattgattctgccataaattttaacttaccaaacaaactcataccaataaaagctgttcgtatctgattgtggactgtgatgagtgtatgagtgagattttatttagtaaacagttttccttgctaaaaattaaaatatctgataaccgtgaatcttataggcctatacccattgaaaaccatgttgtttaataggcctaaaagaatgactgtataacatgagttggctagttgagccttaatgactataattgcatccttctctttcaaaataaactctattttctcaattctgtctcagggctgtttagcacctaagctatttcatttcagatgtttctggaacaatttggcatgctggttttccctctatttcttcaagttttcctatagaacaagtcaatgtctggttaattaattcattgtttcatttaatttttattatgatctaggcacttttctagaaataggatacaaaaatgataaaaaggactttagagattcttgtactcaattgttatacccggtggttaatatctttttcttccatgagcccattaagtttttgctgttgtcattatgaattcatttggttgttttcttttctttctctgttaatatcccttcaagatatctaggctatatatattaccttcctaaatcaccgtgtggagcagggtagaccagctttttgctcccacaggtggaccagggaaagaagctagacaagtatgttcaggagtttcccacaggatattgtgaagcttaaatcataccaagagattgtcctgcccagaagccagggggatggactgttaggtcccttttcagttagccattggctatgaggcagcccaggagtggtggtggggcggagttaacttggtatgcatctccagttgagttagctcctgtcttggtataagctgttagcagccaactaccgcagcatctaaggggtgaatacagtggttcagtgaaaggaatctgggtagggcaccaagaagttatgttgcagatattttgagaagtgggtaaatttcactgtaatagaaatgtgatatttgagaaagatggataactggtagaggcatatatatatatatgcccctaagattatatgtatctgctaatgtatgtgtgtatatgtgtgtgtgtgtgtatacatatatatatatgtatgtatgtatctgctaatgtgtagacatacacatacacacacacagacatacatatatatcttaacggaatacttggaatttgaggttccagataaactttattgtaggaaaaataccagcatcccatgtttagtttctttttttttttttttttttttttttgagacggagtctcgctcggttccccaggctggagtgcagtggcgtgatctcagctcactgcaagctccgcctcccaggttcacgccattctcctgcctcagcctcccgagtagctgggactataggcgcctgccaacacgcccagctaattttttgtatttttagtagagacggggtttcaccgtgttagccaggatggtctcgatctcctgacctcgtgatccgcccgtctgggccccccaaagtgctgggattacaggcgtgagccaccgcgcccggccctgtttagtttctttgtaaaaactttatcacctaatagtgccaatactatgtcttgaatatgaaattatacaattacggcactaagatgactcattagtccagggatatggttatatttgatcacacaacctacaagttctgtcattattccatcccacatagtaacaagggtatgtaatccctggattgccattaccaggtcgcaaatggaccaccctcatgaccccatcatcagccattggtaatgataaaagaataatggagacaccccgacaaggcacacattgattcaattttcaatgaacacagaccctgaaagtggcaagagtctttggtgttttttccccacatttcaaatacaagtgcacctgtgtatccattcatagagattgagcatttaatctctatgaactttattaatctacctgaagacctcctaaattcaccagtccagtctaatctggtgatgaagctgaaatgtcaggaactatgagacatagaattgaggcttcattatgtatgaggccccactggggccaggaacctactaggcatcacttgttggggaaaagagctcctaaattgaacattgatttcaaactacagtaaaaactggctagaatgctaactttgcccccaagataaatcatagtgtagagttacttctaaatcttacttattaacccaaatcaacataatgacaacatctatcacttctggaataggacaagtttctattagatccttacaagcttccactgttccctgactaattagttaaaacttcatcaagaccaaattacaaggaaaaaacttacggtttccaaatacttctaagaaatcaccagctcttccctctggaacaacacactcagtgatgacccaatagttcaggatgcatcacattaggccaagatccactgttagaccaagatgccaccaaaaccaaaccacagctttcagcatccaccatgtcgttcctatgccaaaaaggccacagacagaagtcagaggccttgctagtccctaaagaacagcactagactccatgaattgtcaacagttgcacaaaggaataagtaagttccaaccaccaggcccaacccacaagtttcactattataaatatccaaaagagagctctttcacctttgcctggcaacagaccttcacactaaatcaatgcacttagccttgcaatggtctgtgcactgccttctcctcaaaccagactcaagttaaggtttggcaggtcatccaaagcttttgaccaatttcttcttgccaaatccaagcccagggaaactctgcttgctcttccactgaagagatttcagatcccaggatcctcatctttctaatgataatcgttttccttataagaacctgtattcgtccattttcacactgctataaagaaataccggagactgggtaatttataaaggaaagacgtttaattgactcacagttccacatggcttgggaggccttagaaacttacaatcattgcagaaggtgaaggagaagtaagtaccttgttcaccggtggcagaaaagagaaagagaatgaagggggaagaacctattataaaaccatcagatctcgtgagaattaactcactatcacgagaacaggattgggggaaacagctcccgtgattcagttatctccacacaggaaataagacacacgcatatgtccctcccgtgacacgtagggattatgggaactacaatgcaagatgagatttgcgtggggacacagccaaaccatattaacacctaacagtttatacaaattgaaagctcacacagactttactttcaagtagagatgatcctaatgaaaatataagggtcaagttttctttgtattatcctttctttctgttgccacagcccctgatcctgacagtaccttcttagttcagcccttcctggtgcttaagcatgacacttaggtgtaatgatgtttttcaggatgaaaagtgttattagttctatcctctctttggcttgcaaactggtaaacctgataaagaaatgtgctccagaaacattttaactgtggcttttttatttgttagtttttttgaggataatgtccttaccttgtttgctaattttctggtggttttcacacactaagccatgacaggcttaaattacttcagccaccatggaaagcagtctggatattcctcaaaaaacttgaaactaccatttgacccagcaatcccattattgaatatatactcaaaggagtacaaatcattctaccagaaagacatacgcatatgtacgttcattgcagcattatttacattagcaaaaacatggaatcaatctaggtgcccatcaatggtagactggataaagaaaatgtggtgcatatacaccatggaacactatgcagtcgtaaaaataatgagatcatatcctttgcagcaacatgactggagcttgatgccattatccttagaaaactgatgcaggaacagaaaatgaaatactgaatatttttacttgtaagtgggagctaaacattgagtccatatggacaaaaagaaaggaacaataaacacaggcctacttgaaaggggatggtgggaggggagtgaggattgaaaaactacctattaggtattatgctgattacctgggtgacaaaattgtctgcacaccaaatccccgtgacatgcaattcaccgctgtaacaaacctgcacacgtaccccttgagcctaaaataaaaaatgaaaataaaaacataaattataaaagaagaaagttatttaggccaagcatggtagctcagcctgtaatccctgtgctttgggaggccaaggtgggaggattgcctgggggtttagttcaagaccagcctgggcaatatagtgagacccccatctctagaaaaaatttttaaactagctgtgtgtggtagcactcgactgtagttccagctactctggagcctgaggtgagagaatcatttgagcccggaattttgaggctgcattgtgctatgattgcaccactgcactccagcctgggtcgcagagtgagactctatctcttaataataataataataataaagttatttaaagaaccaaaatgatgaagatgcagatcacatttttgtgttttactatgaagatgcaaatacagcaaacactatgaccaataactgccatttatgaagcacctgctgtctgccagacattttaggtgcaatataatattcagctgtaacaataaccctaagaaacaactactattatcctcattatacatttaactcaactgatgttcagaaatgtacatcatttgtccatagccaagtagtaattaacagaactgctgttagaccctgattacttgagatgctagaatgaggcctcttctttcactgccctgtggcctcccagctaagtgagatgaactcaggctggggcatgttttcagaatgtggtttctcgggaggtttttgctccaaatattctttcaccaatgattatgatgcttgaaatttctccaaaggacatttatttctctgagtcagaagggattttagttcatgtagactcttaaactaaaatacaaatgcacttgaggttaaaatgaagtttaattaggtaacaacttaacaattactgatgaatggctggccagagcttctgtgacataggagaaaaaagtccactgaagggataaatgagagcaatcataaaatttgccacttttacttcttagaaatcttgccattttggttgcttctgaccttgctatgcagttttcaaaacatcggactcgaagaacaaaacattttgctgaagtggagtgatttgtaacatttgcattttagaagagcagttgggtattccctttgatggagtctcttagaagtggtggaaagtaggccttaggaaatggtcaatggttatcagatggcactggcttataaaaccacagggctctgggaatctgctctatctctaactccaacttatggacaagcacgttagtggtctgggagttctagcaaaggccatgattattttaaaaggaatagacttgttacagtttttggggtcatggatacatatgattctgtgtgtctgtgtgtatactctgtgtgtttgaaatttgaactgaatggttttctttacaacatttctgaatacaccgacaaaatagaaaaggaatgaaaatattaattacttttttgaataattgcatctaaagtgataatcttacctcaaacatagttatttcaaagaggcagtttccttaatatcaaattcttctatatgtagatattcactatacatgagactcaataaattgtttttcaagtgaattattagccttgcattagtttgttctcatgctgctaataaagacatacttgagactgggtaatttataaagaaaaagaggcttaatggactccctgttccacatggctggggagacctcacaatcattgtggaaggtgaagaggaagcaagacatgtcttacatggcagcaagcaagagagcttgtgcaggggaactcccatttataaaaccatcagatcaaggtgagacttattcactaccaggagaacagtatgggggaaaccacccccctgattcaattatctctacctggccctgcccttgacatgtgaggattattacaattcaaggtgtggtttgggtggggacacagccaaaccttatcaagcctccatgatagatggtgacatatgctttcaccagtagcaaaacacattagaaaagaatcagattatagaactaaacttctttaataacagcgactttttagtttgaattgagagaattctcaactgatggactttaattaaaatattcagaaatatgacttttggaaatatctcgattagggtaaaatcataacttttaaaaaatattttggaatacttccaaacttacagaaaagttacaaaaataggacaatatttttacccttaaccgtttttcaggaaataattgtttgatgcccttcacctctgaatactctagtgtataatttcaacaaagaaattacccaacataaccatgatataaccgtccaaatcagaaaattagcactgataacatgactgccaccttctcctcagatctcattgagggttttccagttgtcttcagaaaatgtccttgatagcaaaagaaaccattccaggattatgtattatattaatttcatgtctctttaatcttcttcaatctgagagtttctcagtctttccttcactttcatgaccttgatgcattgaagattatggaacatatattttgttctgtcactgcctctccacccgccaagtttgggtttgcctaccgttttcttcctgattagattcggattttgtgtattagcagaaatatcatagaaagggtactttgtttttgttagtgcattctatcagaagttatgtggtttcaatttgtctcattactggtgatgttaactttgatcacttgattaacatgatttctgtcaagtttcttcactataaaattacactttttttgtaattaatactttttctgtagggaggtactttaaaactaggtaactattctattcttcatcagtttctgctgtgactatttctcccactacattaaaaatttattatgactggcttattggaaagctattgattttatgtgtttaccttgtacttaagtgtgtttctaaacatttataagttccaatagatttttaaaaaacaattcccatgaattttctgtagtaaattatttgccagtatagtatgtaagtctttttatttccttcccttattttattgtcatgcccaagaattctagtaaaatgttaaatttctggcttaaatgaaagtgcttctgaattttctccattaattactgtttttaagatgaactttttacagatgtataatcaaataggtctagatttctaagaagaccgttttgttttataaatcaagaatggctatgtaaattagtaaataatttttggcaactgttgaattgataatatctttttccttcaaattttaatatagtaacttaaattgacatattttctaaaataaaaaggaccttattcttggaacaaactctagatagttataatatatttttaatgtacagctggattaaatctgctaatattgtcataggattttcaaaactttattcacaggtggtagagtcctgtacttgattgtgtgtgtatgagtgtgtctatgtgagtgagtatgcactttattcttatttgcttgtatgatctttctttgttataattcttattaattataagaattcttattaattataactaatttcagggctacccttgcattaacctctttcaagtcctgttatctaattttgtattcgtaagtgtgtattctcttctctaaaaaagatattccatgattatgtaaacaatggattccaaaagcttggatcactctttgagttgagcatattaatgtttgtcaacacaaggaaattctaaccatagaaatagccatattggtttcaactctggggacatggaagatgcaatcatcatgcttcagtggagcttctcagctctaacttccagtacctacctactcaataggcggatatgggacaggaattagccatgagatagcagtttatatggtagaaggtggattgctatgagattcttgcatcttattttgatagatctttcttgttaaatcgttgttgattatatcacaataaattaaattatagaactgattgtactgcatgaactcaaaattttgtcgatcctagaaaatgggttatagatttgatgagtttccttccttttgctataagctccatgatgggctctccatgatggcaaggactgtatcttgttcgctgtctctattagaatgtgaaacacatactaaataatcagtgattatttgaatgattcttgaataaggttttcccagaacaaataacattgtttgtttggaatacattacaaactcaatacacggtaaagtgtggacaagcgtcaggaagagtttatgtcttgtaaagctgcttaatgactgctaaagataaattttgcttggaatttctggattaatatgtttagataataaaatatttttatttattttaaaaattattaggtctgtcttacaatgataaagtcatcgcatcttagcagctttgattcagagataggaagcaaccaggcaaaaaagttttgacataatataagaacaagaaacttaaaaaggaaaaagaaatattaaaaaatataagaactctaattcaatttatatttaaattttgtaatctaaaatataaaaattaagaatatataatccatggctcaaataatacccatctgggcttcaatatattccacgaatcaaatttagatattgtttgtcttgagcagagcgttttttcaccagaataccttttttagttgaaaaagcaaaggcaaatgaaaactatagaagttctaattgctaataaagaaatgccatctgaaaattacagataattttattttaaaattttatttcaatagttttgggggtacaggtggtgtttgggtacatggatacattctttaatggtgatttctaagattttggtgtacccgtcaccggagcagggtccactgtacccaatatgtaggttttcatccctcacccccctcccactcctcctcagtgagtccccagagtccattatatcattcttatgccgttgcatcctcatagcttagctcccccttataagtgagaacatgcaatatttggttttccattcctgagttacttaaaataatggtgtctagctccacccaagttgccacaaaagatattatttttagatgtgttggaatgatttgattattactctataaaacaatgacctgtccctttggtacaagtctttagcatacttgcagccttataaaatataatcagatgatagtaagccttttctttaatgaatttgtcctcactctaccctttttctcttagagtatttaacataaaataaaactgattattttttctcatacaatatttagcataaaataaaacattattaaaccatgtttatggcagccttgtttgatatctcattttttcttaattaaaaattttatggctctctgaatcacttagaatgaattttctgaagagaaacatcaagaacttacatctcatttctgttgctttttcaggaaatctcatttttagaatctgttttattaccactgttgtttaccagaccacagaaatatctcctttgactgtctaaaatccatctgcacaaattatttaccaatcatccttttaatgtgtctgtgtgtttcttgaagctagagataatgctttttagtcctttaagccataccctaatagagtaaggcttaaagcaatgcataagaaatagcaatacacaagtaatattagtctctttattcactccccactatcatctacttcctgaaagcagacttttgcttcaatatattctagctgtcaaacattatggcacatttttctgtttctgcctcattagaaagaatcactaggagagattctttgcagtaattatcacacaaacttctcatcttgattaggtgttatcttctggctcatttggcaggaagatttgaggagcaaatacccataaacttcacgatcacctacaggctataaggaatgagattgcatatacaggctggattttaagttgataatgtttcatactttacttggaaacatagtcctgaagcgttgcatattggaaaggatattaatgttatattaatattagagatgtcatgaatttaactcgtatatctgctatttactggttttctttgattctgggatagttaccttaattttctcatttgtaaaagtctacaacataggatagcaaggcataatattttggggtgatgaaatgaggtgctctatttaaaagaatatttcttacacagacttataaagaaagatatattgtatcatcagtgatattaattcatgggactccagtttggtggcccatgccatatgattgtagacagtattacacaaaatgttaacaactaaacatcgcttaccctaggagaaagattttttaagaactctattacattttgttccattttaagttttttttatgactaagaatggtgtgtatcttcttttattatctttcaaataaaagatcctagagaagaattttaaaacgtaccatcaacccaagggaaaaagtacaggtagaaaacagccaaaactgtctaatgtgatctattttgcaaacagtatggtagtggatccaaaatagaatattaaaccacaccacataatcaggatggcagtatgctgccttatcttatacttttaaagaaaaaacagtaaatgattgtggctaagcagtagagtggggaaaataggattccaaaaaaacacggtagcatctggcattgtgtttaaactaaaaaaatcaaaaactaaggttttaccctaatcaagatatttccaaaacagtcatatttctgaatattttaattaaagtccatcagttgagaattctctcaattcaaactaaaaagtcactgttattaaagaagtttagttctataatctgattcttttctaatgtgttttgctactggtgaaagcatatgtcaccatctatcatggaggcttgataaggtttggctgtgtccccacccaaaccacaccttgaattgtaataatcctcacatgtcaagggcagggccaggtagagataattgaatcatgggggtggtttcccccatactgttctcctggtagtgaataagtctcaccttgatctgatggttttataaatgggagttcccctgcacaagctctcttgcttgctgccatgtaagacatgtcttgcttccccttcaccgtccacaatgattgtgaggcctccccagccatgtggaacagggagtccattaagcctctttttctttataaattacccagtcttatgtatgtcttcatatgggagattttaaggacagcttgtggtaaatattctctcaggtaagaactttgcaatacttgtacattgtgagtaacgtgagaaaataagaaaggagaacattaaatatgaggtatacttactgcttggattatgtttcctgtttgtgttactacatttcaaccataacataattcaacatttagatttcacatcttatttgtttctcttgctttgtaaaaacaaaacatttaaattattgtcatatatatgtcatacatatacatattcagaccattttgcaaataaaatggaaaatcaagacaaataataaaacatttatgtcaaaaagtctcaatctcacagtgacctgaattcctaaaagaattagcaaacccaaaacctggttctgaaattttggtaaatttctccaacctctcttatgccttagtgttcccatatttaaataggaatattaatatgaatattattattctgtaggatttttgtgattatttcaaagggtccatttattaattaaacttgagaagcactggtcaaaggtcctctgtttctattaaatagggccattcagtaataatctgtgttcactgtggggagcaattgctgttgatgtcccctggttcccatcatacttgtctccccagtcccgctcatgtccctgtataccaaatggccagaacctgcataccaatgcccaagagctttgccctgatgctggagcccctttaatggccactgaagaccaggactgtggctttcaaaaaatgcttttgtttgtaaataccatagccctcttaccctcatgtatgataactatagaacttgtgttctacattgaatcccagagtttctctaatggagttagtctgtagtctctagtgccactagtagtagacaccttttattagctgccttcttttttttaaatctcactcccaacctccctacctggcctctttaacttccaaaataaatgatttgtatggtatacaaattcttgtctcagggtctgcttttgggaagcccaaaccaaaacaccctattctcagggtactttaactttaccatttcccaaaatagtatacaagatttatgtaattttgatgtcccttttatctatttaatctgctatggagaggtatcaaaaatgttcttggtcacacaatgatagatgtctttgtgtcaatctgcatagcactgaattcttgtgggtgggcaccaccagtcacaaaatatgaaaaccataggaaggagatgctcttgccaaatgagatccctaagggaaaatattttaaaaatttgagccaatgatcacattgtaaatatatgaggacttggtataccagaaagctggctctataaatcaatagtttaaaaagcagattgtttaatacatgctattgaggaaactacttcctctatggaagaaaataaaactttagatggattaaagaactaaatatgaaaagtacaaaactataaaattgttagataaaagtataagaaattatctttttgacataaagttaaaaacaagttgccagaataggaaaaatattgagatagctaaaattgagaagaggggaacaaaacctaaataaagtgcatgaaaatcaataattaaacgtagaaaatgggtagtatctaggaataggaaagttaaagaagaggaaactttaaaatcttagaatcatataataaaatacattgaatatttaatgccagggaaatgcaaattaaaatgacgtatacatttgtatatctaagactgaaaaaaatttacaaatccagctaatgtcaaatgttggtgtgatcataaagtctatctgtttggatgggcaagcattagctatgaagacgaataacacaaaaaccttggtggctaaatacactgaaggtttatttattgttcatcccacatgtaaattacagtgttatagtcccccactcatgcacgcagaaacccaggctcatatatcacaaccaattgaacattgttgatcatcatgcaggtgggaaaaggaaagctctctgagctgaaaatgggggagttagttgtggggaactggggctttgtataagcaaataaatgatgcgtgtaacttctgcccacaattcactggtcagaagtatccataggtttccaactacatggaatgaaaggaaccctcaagcatttctggtagaagtgaaggctgctttgacccatttttgcagggcaatatagcaatacttagtcaagttaagaatatttgtacactgtgttccattttcttcttagtgactttaaaacatctctctgttagactgctctcagctaaaggtgctgcaagactctcagttttgtgtcctagagtatccttcattgcattagactctcttagcatttggaaagatatcaatatattggaactatcaataccactgaagcaagatacttacgccctcctcggtctttcttacagatcgaaacttgtttctgtcacagttaacttttttaaagatgccagatttttaacttgtaaacaaaaattcaaaactaagcatatttttcatatagatgtttcccaataatacatgatgagcagtgatgtcaagctacctatttttagtttaataattggattttcttgctcacctggaaggacagtcttcacggggacagagaactcgctgtcatccagcctgtctgtgtccttgttgctatttttgagacttaatggatttctcccctttctcttcatctgcatgatgctcatccactccggtccatttgaatctcaacctagtgtgcctcttgaagaatggtttgcttaaattgctatggcaaaaaacaaagcataagggggaaactgtttctagaatgaatcttctccattcatatttctgagcagtatttgttcaaagccttaaggatataatccaagccaaaaataatgcatctgaggccgctggcccacagatgctcagcaagcccttgaaatgcacttttgtggagtcttttcctcttgttagaactaatccttttggaatgtcagattgtccccaagactgataattaaacatgaaaaattaggctttggggaagtcatgaaaattagagccaacaagccttgacttctttcttactgttctgtacctagaagaagaatagtttattccctttaatatctaaaatgtcctgattatgaacgtttcttttctgactgtttccaatttacctgtcagttcaccagaactggagacacttaaagcttgttttacagtgtgttgctagcacccagaagagtccctaacatataatataagctcaataaatacatgtttattgaacgagtaaataaattacaggtccggtttcatggaaaaaaatgaaaatgcattggagatgtgtcttcaaaacataaataagtaacgtaaatggagaaacttgcaatttaagagactagaagcaatatcaaatgatgaatcaagtatttgttacccacaagaaactattggtcagttttatgggttgaattttgtccctcaataaaattcgtatgttgaagttttaacctccagtgtccctgaatgtgaccttatgtggaaataaggttattgcagatgtaattagttaagatggggttataccagactaaggtggtcctccaatccaatttgactaatgtccttaaaaaaaagggaaatttggatacagacaggcacaaagtgagaatgccatttgaaaactggagatatgctgccatagtcaagggaggtcagagattgccagcaaaccacaagaccttacagaaaagacctcagccattttccatggtaagcagaagaaaccaactctgccaacatcctgattttgggcttctagcctctaaaactgtgggacaacatatttctcttctttaaggtacccagtttgtggttctttttatggcagccctggcaaaccaatacagttagtaatggtgatattgttttaaaaagttaatagagggttgggcacatggttcagtcctgtaatcccagcactttgggagactgaggtgggcagattgcttgagtgcaggagttcaagaccagcctggtcaacatggtgaaaccccatctctacaaaaaatataaaaattagccgggcatggtgacacatgcctctagtccccgctacttgggaggcagagatgagaggatcgcttgagcctgggagtgagctaagatcacaccaccacactctagcctgggtgacagggcgagactctctcaaaaaaaaaaaaaaaaagtaaataaaaaaactaaggttgatacaggtgcttgtgacaaagccaatagctcagacaacatttcccctgcaaactcagattccattaattcacggaaaagtttctctttttgacatgtgcaattagaaaaattagaacagtggctggactctatgttactgaaatgcaagggtgtgtacaaatgaaggttatggaagaggatgtgctccaataataaatgagaaagctgggcaagttcatgaaatatttcaatttgagaaggtaccagtttgccagagactaacaggtcctactcaaagtcttctagtgttttatctacttccctaattttaaattaagaatctcagtacatccaatggggaccctgggatattcagacgtagtttaagaattgagaaccatccagctgctgaatcttgagtaagaaggcaaagactacaataagctgataggaacacatgttctcttatctttatgcctttctgcagggaggcaatcataaaacaggatgaggaaaacactctgatttggtttggctgtgtctctacccaaatctcatcttgaattatagcttctataattcccatgcattgtaggagcgacctgttgggaggtaattgaatcacagggacaggccttacccatgctgttctcatgatagtgaataagtctcaggagatctgatggttttataaaggtgaattcccctgcacaagctcctcttgcctgcctccatgtaaaacatctctttgctcttcctttgtcttccaccatgattgtgaggcatctggaacaactcctgaactaggattacatgtggaactgtgagtccattaaacttatttcctttataaattacccagtctcagctatgtctttattagcaacatgagaacagactaatacatcctcctggaaacttttcagctgacttagtccagcagaaacaccatcacaacacctaagtgaaggatgaagggtgaagcctgtgacaatggctttcatagtggatttctcgaacaggatttattttctgtgacagagatgtgtctctgatgccatatctataaaatatcaataaagctgataaagaaaatgccaaatcggaagtggctgaggggagaattttcccacaatactttgaaagaaccccattgataatttttcttctcttcatcaaagattgggaaaacagtgaatcaaagttgggcacttcaaattagatggagtagagttgtttatatgatttttttttagtaatgttgctttcccacatcctattctgactctttttaaacttcatgttggccattcaaagcaaggggacatttttagaggcatgttaacttgctatggagacagtgaccctagcatttggggcttctgtgggaaggaaggccttagccacaggcaattcctgttgacgttcacagtgaggcagcatctgagacgatccttctactcttcaaagtgtaataaaagacatatttttaaaagtgagtactcatttagtgaatgcttccaagtaatcttccacctaacaacttagggcagagagtttgtacttcggaatatatcgggaagatacatgtatttgttatcacctatttttacatttatttttattgaaatagatatttaggccactaccctagttttgtagctacatactggcagaaaattcttaagttattagcaagattcatgaaaataacaaagatagaacaaatatagttcgtgtgaaatgaagagttaacgacaatgtcaaaggggaagtcataggaagatgcagatttactcacttcagctctgtactggaaactcttattttttctcctttacaaaaatctacgaactatattttgctttgttaatttgaacaacttaggtttcttctttgttatttttcactcatgtaggtgcagagatataaaatcagtgattttgaagagtaactaaaaatgaattaatagccatacatttatgcagacagaactttatttttatcatctgtttgtctaaataaataaaaaagaagtaaccaaaccaatttttcctttgctgtttgttattagtcattcaaatatttgccttctcattgagttagcgttttagtcaaaatagctttcaatatgctaaaataagtaaactattaagttctggtggagtttttaaattaaaaataatttattatgcagtgatgtatattaaatggatagtttaatatatgtatatgtaaataatgtttttaaatagcattatatttaatataatatttaaataaatgttgcccacatttaaaaatttcttatttgtttttagtttagtagctctaaaaattctttaaaatataatacaaaataaaacacagtagattctgtcaattactgaagagtgtatgcatatataacatacctatatgttacacatatataacatgcacatgtataacaacatataatgcttttctttgttgtttttccaagggccattattataaaatcagagatatgttcttccagaaaatgtttgacttgaaacataatggaaaattttaaattaaataacatttaattttaagtaaaaacatcttctgacatgatataaattctcaacctattattgtaatgaattttaccctaatatattaactggtaaaaaatatgaaaaaatacctaaggttgaaatttcttcttaaaatatacgtgctaactttatttatttatttatttatttattttcagacggagtcttgctctgtcgcccaggctggagtgcagtggcgcgatctccgctcactgcaagctccgcctcccaggttcatgccattctctagcctcagcctcccgagtagctgcgactacagacacctgccaccacgcccggctaattttttttttgtatttttagtagagacggggtttcaccgtgttagccaggatggtctcgatctcctgacctcgtgatccgctggccttggcctcccaaagtgccgggattacaggcgtgagccactgtgcccggccatataggtgctaactttaaataataaagtgccatttacctccattaaaataaaaaatgtttaaattataatagagcaattaaggaagatttggaagaaattgatatgctcatgtgaagaaaaacaattcattcagagagaccactgattattttttcttgcaatttatcccgagagacttagcatgagggaaaataagaacaatagaagaaagctatttcccaaactgttcttttcttgtatacaataattcaatatttgctaaataggggagtagttaattaaatcaaggcctatttacttaatcaaaatatgtgccattaaaagaaaatttataaatattttgtaagaatatggatatagtgttaagttggaaaaaataaaaattgttcttgttgtaatagtgttaacaacacattagaagtacgtgtatatatttgatagtagtcattgcagtggttaggatagtgagattataggtaaaatttctctatttttcgtaattttatgatatcacgatatcacctgtataatgcaaaataaacttaaaggtattataatacatttggaattctaaaccccagtgaaagctctttattatttcctatgtaccagacagttaaacccaatgatacttagaaagtaaaggcaaaaaagcaagtgagaatcttcctgaagctggaagccattaccttcagcagactaacacacaggaacaggaaaccaaacactgcacgctctgacttataagtgagagctgaacactgagaacgcatagacacaggggaggagaacaacacacactagggcctgtcagggggcggcgggagggagtgcatcaagataaacagcaaacagggcttcatacctaggtgatgtgggttgataggtgccccaacccaccatggcacacgtttacctgtacacaaacctgcatgtcctgcgcatgtatcctggaactttaaaaaatgtattttctatatccactctcattattctgtgttgtgcattattcacaatagtccaggataagctgtgataagaaacatgcccggcctgtcagagtcagaacatatcaacagtttatttctcaattgcatggtgcctggtgactctgtgctgactcttctgctagtagctacacttggcttgtaaattctctaccatcaggggaagagaaagaggaggcacacaagcttttaactgacttgttccagaagatacacacaacacttccacacacagaacatctactgaaagtctgttgatcagcaggagacacagtcctgacggttaacttcaaagaggtctggggaatgttgcagaaggccatggcctattagataatctctgtcacattcagaaagcaataaagttctttgttcaaacgactaagacctccacaaacaatgattcaaattcactttctatcactcaccagcaaataatcagacatgtggaaatgaccattacggaattcaaagctagaagtgatgcagaaagctcctctccttagaggggcagcttgagactttattttcctcaatttgatgtattctgattcatcaggtgatagctggaagcttcgagtcttatacctcagcctgtctaacccttgtttgggatagtgatgtactctctttcgggtatcctctgttctgtttagtttctctcttccttggcatatggctttcacttagatttacaattactatttttctcaacaggaatgtccttctctgacatcatttctccttcttttactattctccagcattgttttaggtgccaggaattcttatgtgattaagaccggaaacaatgtgaccctcttggagattacttcctgttggtggaggggccatacatgagaaaaaaaagagggccttcaggccttctggagaggactgcccagctgctatcctccacagctctgtccatcattatttgccttgtgactaaaaggaccaatctcatcatgcgctttattgctggaatgtcagtcatctcgtatgtttatttctcatctccctatagagtatggggttacttttctgattgcatctcccactccctgctcatatccctcccactcagcatcattttaatcccttctatggttttgatgacacagtcaaaatgcttataccttatctttccaaagaaggtttcattctccttcttgccctggcttgctgctgattatacagctcatcttggtgtgtcaagtagtagctgtatctcaccaacaagcttggcatcatgggctgcaaatggagtaagtgtgctttttgcctctctctgaagttctgaaacaattcttacttcctccttcctaaagtgccccccttttcccctttaaatctcaagccttcagactaaaccattttctctcctttctcgtgcaagtgcctactgatctcaaaacaaatccctttattccctgatgacattagcccccaggtgaatgtcacatgcaccaaagtattcctctaataatttttgtgaatatctgtgtaaacctttccttcgatggacctcttcatgttttacttcctttggagttatcttattctccacctacgtcagtcactactcgtacagtcatagttaggttaacagcaattgaaaaccctctatactctcaatttcaagtgtgtctcctcctgacccttacttactaccatgctaacttatgtctttccggtagcctgacttcaacaatcttctgatccccacatagactcacaagccattcatcccattgccttttcattgccccatgccccctaatgttagagtgatcatatgttctggttttcccaggagagttttggtttaaacctggtagctcagcataataattaacagtgctctagtttagataataaattatgtggttactctgcctaatgctctcacttcccttcttatttggccaaaattctgtagacaattgttgtaaacataaccttgtacagacagttgacccttaaacaatgtggcagataagagtgcagacttcttgcgcagtcaaaaattcatgtataacttttgactcctccaaaactgaactactaatagcctactgttaactggaagccttactaataacacaaacagtcaacacgtattttgtgtgttatttgtattgtataacgtattcttgcaattaagctagagaagagaaaatgtcattcagaaaatcatgaaaaagggaaaatatacttactattcattaagtttaagtggatcatcataaaggtctttatccttattgtcgtcaggttaagtaagctgaggaggaggataaggaggagttggtcttggtatctgagaggtggaagaggcagaagaaaatctctgtaccagtggacccatttgaaattcatttacatggtcaactgaactttacaactgccttgttcctcttccccataatcaatgctatgccaaaagccccaagtcaggttaaattcaactctgcaaatgtcttacatctgcatctgcatctgcatctcagtgtggctggaattaaatagaataccatgctgtcagacctcatgttaaatttgtgacctctaactttttgctgtcgaataattatactatattaccccagttaatttattcatccactctcctaggtgatcagtttatatgtttagtttttttcctccgtgaacttttaaaacttcttaacctatctgcatactgagctgatgatctcgtcttgtatttctctaagaaaagggaagcaatcagaaaataacttcctcaaacttccactccatggggaacctgcatagcaccaaaccctccacctgggcaccagctcccacccaaccccggctatttgactcttctctttttttcatatcccagacacaatctacctacaaatattgtcagttctatcttcaaaataaccaaaataatctctctatatttactgcttctaccttaatccaagccactgacttctctcaactagacaattgcttttgccgaataactgcttctgacccagaagtccttgcctatttgcagcagagttgttaaatgatattgttaggatataaactacatcatgtaattcttcttttcaaatcctccttgtggtgacccatctcattagaataaagacaaaattcaacaatgacttacaaaggtctataaatgtctggcctccttccccatcccgactgttttttgcattggctgtttcctgccctacaaatgtcttcttacctactctcaacccccaccccacactgtcaccaggacttaactcaacagaacactttctccatgaggactctctagtccactctggtccaaatggaaggactccaacccaagccaggctctccaatccctagtccctaccttgtttttctccttaggatctcttgtctctttttttttataaccacttcttttatttagagaattaatatatagttacatattttacgtatatacatattccatttttctggaattttatccatgactttctaaaaattcattgggaaaaaaacattatttttggccaggcgcggtgactcatgactgtaatgccagcactttgggaggccgaggcaggtggatcaagaggtcaggagatggagaccatcctggctaacatggtgaaaccccttacctactaaaaatacaaaaaattaaccaggtgtggtggcacgctcctgtaatcccagctactcagaaggttgaggcaggagaatagcctgaacctgggaggtagaggttgcagtgagctgagatcacacaactgcaccccagcatgggtgacagagtgagactccatctcaaagaaaaaaaaaaaaaaccatgttatttttatgaatgcaaaatctgatggcgtggtggtgagagacatggctggaaaactccctttcttggttagtatcggtaatatcttagacaaattgtatggacattttgatgttcagtttccttattattttaatgaagaaaagactaaaattgcactttatcttttctttattatttgagggttaaatacaaatgttcataaaatacttataaaacaagattataattgttttatacaattatacaattaaaacaagattaaattgataataaatttctttaattagctgttattattcccagaattagattggctgctaataaattgaatgataagttcagcctatattatatttcaaccttcatcaggtcttcacatcctttctgtgaggttatctgatgatgagtgtaatggataagtctaaaattgttaggaaattgaggcttagcacatttttaatttcacttttattatggcccgtgttgaaatgcaaaatttctgtaggtttgatgtttgctaaaggcactgggaaaaacacacacacacacacacacacacacacacacacacacatattccttatatgactaattcaaacacctttattttaaaactctaagtcagcaacaataagaattttaggtggacccagttacagttctcataatgcttggttgttcacttcatctgaattttcagcaaagaaaaagccaagtttaaagtgatgaaatatttaactcagaaagagtagttgtttgagcatctctggatttttataaagctggattccaaaagaatgacagaaaacatggctttatttaatggtttctacataagaaaacaatagtattacaacattaagcctaaaagaaacctgtattatttcgtatactttctaattgggtgaaatctaaacttctttgaaataaaacttttatgacaatgcagggatgttagtaggtcattaagtttctcttgcagagaaaaatgaataataaagattgttaaaatattcaccattatataaagatagagtgaaaaaggctttcccttaaattgtagaataaaatctttctgtccattagtgtctacaattacaaacataactatgcagtcttacacacataaaaacatatttgttttaaatgttaccttcaaaatgtcttatagttagggtttgggaaatgaaaacacttacatgtatgcatgcacacacacacaaacacacaacgcacacaaaagattggtgatgaaccacatttaaaataaaacattcttgctgatgaaaagtgttttaaagagtaagtcattattggctttatctctgaaaagctctattccattgcagttaattacttctcactataggaggagtattagaattggaaacagccttcaactcccaccatctaaataccagtataatgtacacccacccttctgccagaactgattgttgcaaaaggaataatttgaaccagcaatacttaagtaagaagaacacacaccaatctggccttctttgtgaattgcttaaaacaatagattcttggcagaataacctacaaaagttgctctttacagcaaggattagtattagccaatatttcttcttaatttcttcaggataaccgaagggtggaaataatgtgaggataggtcaacactccaacagtcttcaaattggcaattaatattttgtgaaatgcctgcttttaattatcaatatccatattggccagttaacaggtaaaattccttaacttctcaaggaatgcatgcagacttaaatcagcaatttctgttaataatttctcctttggaaaacctataccatatcaagtgaagcctctccgctgtccccatcttgcaaacagacttgattgctatcatgtcttgtaagcagttgaaaagctataaccgtcaaaccatgcacaacatcataactctgcttcaacaaattggaggcaaaccaaactactacatgcagtcagcctgctcagaattctcttcttcagatgacatggactttttcactttctgaggcatgagcagcaccagcctggaaaggcattgggaaacataattgcacacgaagcgtgtgcagggtaatgaagcgaacggccctgatgcacaaacattgtgaccgtgcaggagcaaatctcacagggaaatgaaaagaccttcaaaaggaaaactgagccagtcctgtgacctggctttcctcttaccctggtttgaaaactagcatcaagggagataatctcaaaggcaataggtgatgacaactcaaaatagctggctgagtatagtgacagcaagtgccaatatataattccccacccctttcaccactaccatgcctgaagttccagattctctgctaatgaccaattcgtttaagttaggaacaacccctcctttcaaacaaaatctaatcctgggacagtttaatgagattatcagccatatatcctttatttgaatttattttattttatcagattgctttctttctaatatctacttgaaatttacagaaacaagaaaagaggaatttttaatgaaggaaagagagagaaaaggtcatttgtaaccaagaaaactatgagaacaactttaatgtctcttcaaagctttgggctttgtaaatcagaagacaaaaattagaatgtgggcttcagaccctgaaggattggatgcggagaagcagccagagggctgaacaccaagatcgccaagagttttgctgaagacttccattgctctctaacttatacttcggtacttgtgcaatgagaaaatgtgccaactatctcagtttattaatgaaatagttatttttcttggaatagaatttaacaaaaattcatggtatttcacattcgcccatgtctattttgaaatctggcattgtttatcctctttcctaggcttcttaaaattcacccaccccaaacagacacacattcccacttgatccagttaaggatatagaaaacagattactgtaattctttgcttctgaaactcagacacatgcatcttctagaaagtatattaatctaccaagggtgaaaaaatacaggccaggcatggtggctcatgcctataatcccagcaccatgggaggctgaggcaggcggatcacttgaggtcaggagttcaagaccagcctggccaagatggtgaaaccctgtctctactaaaaatacaaaaaatagccaggtgtggtggcgtgcgcctgtagtctcagttactcaggaagctgaggcaggagaatcgcttgaggctgggaggcggaggtggcagtgagccgagatcatgccactgcactccagcctgggtgacagagtgagactctgtctcaaatatatatatacgtatatattatatatatgtatatgtatattacatatattatgtgtatgtatattatatatacatttatactacatatatgtatatattacatatatacatatatattacatatatatgtatatatatgtaatatatacgtaatatatatatttcctcttttttgcaagtaatgcaaaacaacatttttacattaaaagagatatagatctattttagataggtttcaaaatttacgctgttctaaacacgtccaagaaatttcctgcttctgtgaatcactatcatttacatctctagaccctctgtgtgtattttttttctgttttaaatgtatgtttgtgggaaagtttttaaagctctttgaatagcattcttttggaactagttctgccacttaatagttatgtgaacatagcacatttcttctctagtctaaatctatttcttcatctggaaattaaagacatggaaataataccctctcagttcctttgtggagacagaattgtaatattatatgactactttacatcatcagttatgattgaaagtgctggagctctcagagccacatttcatgacccttgtttgacaggaactttgctaacagatgcagggagggacagcctttggaattccttgaggtaatgttatgttataccaaaaatatctactagggttttacagaaatgccaaacattttcgtagagtctttggaattcctgtagaagggttttacataggagccatcatttttagtgtacaaattttcttgtgatttcatcatggaacattttagtcttccaaatatatttttgagaaacaactttgagagagaatttttttttcataagataaagagccctcattaagaagtgtgaaaattttcttaatttcaatagaagaataatattctaaagtctcaatatagatatgtgagaatatagaaaatacttttcattttgggacaggtcatttataaaaggtaatttatttgacaatttcaccattttcaatgcctaaaaaagataagtttggcatgatgcaccactatcattttgttgctttaaaaaatacattgctaattagaccttggaaacaacatttttagagtttgttttgcagagaaacacagatactccttaaggtgacatgaacacttggtagcagaatagaaataatagtaatcaatatattgttgagtctggacactccatgacccttaaactactaaaggacagtgttaatgacatcatggtcaaagattctcatctactgtaaacaggccagttagctcagtaaagctctacaccagggcagatatgatctttaaatggtgtgtgaaagaaaacctcacaactcagaatgagttatgagaaagtgtgttcatcacattctagtcaggaaaaacaacttttcaccctaagataaaaacaaagcaaaataagacaaagcaaactcttgcgggaagtcagggaccccaaatggagggaccagctgaagccatggcagaagaacgtggattgtgaagatttcatggacatttattagttccccaaattaatgcttttgtaatttcctatgcctgtctttactgcagtctctaaacataagttgtaaagatttcatggacacttatcacttccctaatcaatacccttgtgatttcctatgcctgtctttaatttaagctcttaatcctgtcagttgaggaggatgtatatcatctcaggaccctgtaataattgcgttaactacacaaattgtacaccatgtgtgtttgagcaatatgaaatgtgggcaccctgaaaaaagaacaggataacagcaattgttcggggaataagagagataaccttaaactctgatcgccggtgagccgggcagaacagagccatatttctcttctttcaaaagcaaatgggagaaatatcgctgaattctttttctcagcatgggatatccctgagaaagagaatgcgcacctaggggtaggtctctgaactggcccccccgcccggggcgtacctgtctcttatggttgagactgcaggggtgaaataaactccagtctcccatagcgctcccaggcttattaggaagaggaaattcccacttaataaattttggtcagactagttgatctcaaaaccctgtctcctgataagatgttatcaatgacaatggtgcccaaaacttcattagcaattttaatttcccctgtggtcctgtaatctcaccctgcctccacttgccttgtgatactctattaccctgttaagtacttgatgtctgtcacccacacctattcgtatactccttccccttttgaaagtccctaataaaaacttgctggtttttgtggcctgtggggcatcacggatcctaccaacgtgtgatgtctcccccggactcccagctttaaaatttctctcttttgtactctctccctttatttctcaagccagccgacacttaggaaaatagaaaagaacctacgtgattatcggggcaggtctcccgatagcaaacaatatttacattacttgtaatggcaaaaatcgcaatttcttttgcacaaacctaatataaagtgttgtgctttccagctctagttcctctcaaatgaatgaaacattggtgggattgttaatttaaggcatcagtttgattgaggtgcccaggtatttagtcaaacattatttctgggtgagtctgtgcaggcatttctggatgagattaacagttgaattggtagactaattagagtagatggccctcctcagtgtaggtgggactcatccaatccattgatggcctgaagagggtaaaaggctgagtaagaaagaattctttttctctgacattctttagctgtgacatcagtcttctcctgccttaggagttggactcgaactcagacttggtttgaaactttcactataatttcttttggttctcagggcttcagactcagtctagatccacaatatttgctctcttaggcctccagctttccaactgcagatcttgaacttctcagccttcataagattataagccaattccttctggtgactatctatctatttgcctatattaatagtcctgtttctttggagaactcagaataatacacttggatcttacttgtaagttgctgattccctaacagaaataaactttatctgtgcattttgcagtggtgatatctaaagatacatccgttgtgcatatgataaccatgagagaatattgctaggtttaacaatgcaaagattaatttataaacttagtgactttgttgattttctattatagtttctcttattcctcagtttctttaaatacattttgtgaattttgtttgttgtctaatggtaagccagtctttctgaaacagactttcttgcaaaccttttttacaattacgtgtcttttcttttggcctaaaagcttttctacctaagtctttctttgttagatatattgctaattttgaggaaggaagtgaaagaaaatgtggaaatcagaatagacaataaaaagagagcatgtaaattcagctatagaagttagcagacataaaatttaaaaatatattaccaatataaaaaaatgacaaaatgggggatgtaactatagaattggaagctatttttaaaagtaccaaatagtattcctataattaaaaaaaaactaatgcttaggaaagtgtgtaacaaaaatgtgagtaaaaatgaaaagttatagcatacataaaattggagtcaccacaagagaagaacatgagaatggggcaaaaattatattttaaaaagtaatgatatagaatttttcaaaactgattacagaccttgggccacaggttcaaaaacttacaaactttgaaccaatttaaataaattatgcacatttacatcatagtaaaattactaaaaaccaagaaaaaagaaaaatcttaaaagcaaccaaagggaaataatgaattattctcaaaagcaaaaatacccgttgatatctagcttttcaatggaaataatgaaagacagaaaacactgaaatgtcttctttaagggttgaaaaaatataactaataaatcagaatactatttccaacacgaaatatttattttaaaaggatagcaaagtagacatattttcagaaaaactgaaaagtttttagctctctatagtcatgcactttctgtgtcagcaatagaccacatgtatgatggtgatccatgagattataatgggatctatgtaatgtaaaacaaagcattataacctcatgggatcaccgtcatgcatgtggtatcatacatgtgatatgtttagctacacgaatacagtcgtccttcagtatactcaggattggttctaggacctccacctatacccctatccccacattctcaagtcctccagtggaccctgcagaacccatatgtaggaaaaggaaaagctggccttgcctatacacgggttttacatcccgggaagcactatagtttcaatctgagttttgctgaaaaaaaaatatgcatataagtggacctgtccagttcaaacctatgttgttcaagggtcaattgtgtttaccatggtgttaaaattggctccagcattcagtacaataacatgctatacaagttttttatcctaggaggaataggctgtgctgtataacctaggtgtataatagtctataccactgaaatttgtacaagatgctctgatgttctcacgactatgatatcacctaaacatacatttctcagaatgttcccattattatgtgacacatgagtgtatatataaacactgcattcaacaattgcaaaatgcattattttcaagtgtacatggaacatgtaccaaagtaggtcactatatgctgggccataaagcaattccctacaagtttcaaaggatttgataatgaaattaaagagagtatgttctgacaaaaatgaaattaaactggaaataaaaaccacaaaaacagaaatataagtaataaaattgaactttaaatgttaaatattacatttggaaatcatccatatgtcaaaaaaatcacatgaaaattagaaaatattttggactttcataatgtatgtaatattgtcataaaatataatgacaatgcataaagtcgtctttgttctagtaatgtgagtgatataaattaaggtaatttactgaattaataaaggagaaaaacatatgatcatctggttaggtgcagaaaagtattgacaaagtcaatatctgtcttttaaaaaatgtcttggaaaactggtaataaagggaatttcattactctgataaagaacattatgtcagtttgttattccagcctaacattatctcaaaactcaatgactaaaaatacatatttatttcatttttgatactttggattggcccatgtcgaatggatttgcaactaacaaatagaaaataaaatatataaataagattttttaaaatagcaccaaacatatttaatgcctataaataaatcaaatgaaagatgtacaaaatctcaacaaagaaaattacaagacaaatattactgaaagaatagaaaagtgcaaacaaatgcaatgatctaccatgtttatgggtagaaagaattatcacttaaacatatcaacaacgtccctcccaatagtaaatacaatacaatatcgctcaaaatctctgcaagtctgcaagtgtgtatgtgtgtgtgtgtgtgtgtgcgcgtgtgaatgtatattaaaaactgattcaaaaatgtttctggaaattcaagaggcaagaatagcaaagaaaattgagaagaatgaatttggagaacgtacactaccaaatatcaagtttcgttataaaactaaagtaaaactgtgtggtattgacacaatcaaacaaatagcatagtgggaaagcaggaggaatacaaaatgatacattcatagaaacaaacacaccattataacaaaagtatcagaacaatgcagtaatgaaagggtcatattttcagtatatgatgctggatgaattgggtgcctatatggggaaaaatagaacttgaaattttcattagatgatgctgggtcaattggatatctaaatgaaagaaaaattgaattaaatgttttgtcatgtcttacaccatatttaaaaattatgtgtagatggattgaagattcgagatgaattgaagatctaaatgtgaaaggtaaaacagtaaagtatcctctcaccttcaaattggggactgtgttcattgttacaatgtggatgagtcgctttataaatttgactgtgagaagtcagataggacaatgtatactctgcgatttcatttacagtatgtccttcttagtctcattgatagattcttggaaacggagaccataagcaaagcaacatataataaaaccaatattaccatagcctgattaatataaaaaagagttaagttcctacagcatatttctcatctggaaaacatcaccaaactcctcaataaagacccaaacacttctaacatttaacattgaaataaatgtgagctatacatccatttaagaaaggggaaaaggccgggcgcggtggctcacgcctgtaatcccagcactttgggaggcggaggcgggcagatcacaaggtcaggagatcgagaccatcctggctaacacggtgaaacctcgtctctactaaaaaatacaaaaaattagccgggcgtggtggcgggcgcttgtagccccagctactcaggaggctgaggcaggaggatggcatgaactcgggaggtagagcttgcagtgagcggagatcacgccactgcactccaacctgggcaacagagcgagactccgtctcagaaaaaaagaaagaaaaaaaaaaggggaagaaaaacaagtaagataattactagcccaatttttggtgggtcattgagtgatggcagtcatagtagtggtgggttatgttaaggaataaatgtttgcaaagtgaaaattctaaggagcactccctacctccacgcagttcaaaaacaagcattaacacatatggcagacttgctgagtgctttcagaccacatcattgattgttatgcatttgtatggtaatagtataaacatttttattttgcaataatttgtatgcattcattcattcattcctttttcaacctgcttattccaaggtctcgggtgacaagagcctattcttgcagctcaggaacaaggcacaaactaacactggacaggacgtcattccaacataggtcacactcaaacacacacccacactcactcagactgcgacaatttagacaggccaattcacctaatgtgtggatctttgtgatgtggaagaacccagggtacccagagaaaacccacacagacatggggagaacatgcaaactccacacagagtggccccaggaatcattttttcctcatcagtgttacaaggaaacaatgttgaatgaaacaactttattcgagaacctgctatatacagagattcccccataaagtaaaatgaatcagtgatgctggaagtcacacagtagctaccttggagggctaattatgtgaatttgtatgaggtgtcttctgtagtgctggttgtgtctgtaatgtcgtttacaatagcctaaaaaagctaccaatgcccatgaataaattgaataaaatatgtgaaaagcttctccatggagaactacaatattaaaaaactagaaaaatgaaaaaagaatgcatggataagtgacgtgccattttcatgagctggaagacgcatttctgtacatatggcatctgtacccttaaaataataaatgcaaagcaatcacagtcaagggatgccatcttatatttcaacataaagcgtatgtactttgtgcttcaataaaaatggcacaaacaagaaataaaacacaaaatgaattgtaattacttagaaaaaaagaaatatgttgttgttgtagcatattcttgttctttcatggtttggatgatgagaatgtaagactgtctaaataatatggtgctaatacattccattgctcatgtcaaatttctcaccttctcatatggcatgagtgcacacacatttcggacctttatatctatgacattttgggaaatggctttaccatgccacagcaatattttacaagtgaacttgatttggaaagaatcactggcctgaaatgtatttgttctctattagaactgttggcaatcttctcagtgacagtacatcacaatcatatccacgtgcatcagtgttctgatgcccattgtaacgtacttcactatcacatgagacagggcataaaggaaagttggaatcaaagtactgtgttctacttttttatttccagttaaaatctgtgaccgagcatagcacatagcaggtccagtaatttatgaatgtaaaattattaaagaagagaaaagctatcctacttgtgtaataatttaatagtttgttataaggctgcacagtattttatgacattactgaacagatgatttgtgagtctttagagataaatgaatctggcttctacttgacacagatttcccctgacatgtggctttctaaatgctgtttgaacacctctagaaatggaaaatccattatggagcagtttattaaattttatagatttcttttaaattattagaagacttttatgctaatctaaagtatctcttcttgtgattgatcttttaaacaattctttcttttggtgcacacagaataaaagtttaatttcaggctatatgtcacatactcactttttttttttttttttttgaaacggagtttcgctcttgttgcccaagctggagtgcaatggcgagatcttggctcactgtaacctctgcctcccaggttcaagcaattcttctgcctcagcctttcaagtagctgggattacaggcacccgccaccacgcctgggtaatttttttttttgtatttttagtagagacggggtttctccattgttggtcaggctggtctcgaactcctgacctcaggtgatccactgcctcaacctcccaaagtgctgggattacaggtatgagccaccgcatctggcctagtcacatatatttttatattgtttatgatattttttggtcttttagataaaatcgagctgaaattcatatattttgagctaggtaacatagtgtgttcaatgtactgagttcaataaaaataaacttgtattttgatttttcataaataaatcgataatcgatttctattctagaccttctttacatatgtcttctttatccaaaagtgtgggatcatcaactcagttactaaagccagaaattcttgactcctcttcctcgaactctccacattgaacttatcagcagattctgcaggttgtacctaacaggtctatctgacctcacttttgatctctctattccatttttcagacagaactagcagtcttttaaagttaaaaaatcatgatattttgtagtacgcagccttctaaggcagaccacagcaatctccatctcctgatagtcatgttattgtgcaattctcttctcctgaaagtttcatagatatattgacatctaatgcatagaatatggataccatttctgagcttatgttgcaaaagactgttacttcagtcttgtttgctctgtttctttctggctcttctccattactccctctgatgagggaagctgccatgctgcacattgccttatggagaggtacatgcagcaaggaactgaggatggcacccagccaacagccagtgaggacctgaggccctctgttcaacagtctacaaagtgctgaatcctgccaacaaccacgtaagtgatcgtggaaatggatctcaagtcacgcctttagatacctatattcccagccaacacattgcagtcttctgaaagaccctgagccaggggttctcagtaagctgcaactagattcctgaactataaaaaacataagatgttaaatgttgtcttaagcctctaattttgtagtcattttggacacagaaatagataaccaatgcatactcctttgcattagtaaaaaatacaatacagtacaaaaatccctttggttaacaatgcaatcagtagcccactacctactgatccatcctccccttgtgcttctccattgcctacaatgctctggtcagactaggcttcttttagttcttggagcaagtaaagttcttggccacttaaggcttttgttcatgttgatgtctctactggtgtgctttaaaaaagtattttattcatacacaattttacatattacatatttacggcatacatgtgatattttgatacatgcatacaatctgtaatgttcaaatcagggtatttaagatatttatcaccttgaacatttatcatttttttgttgagaacatttcaaaatttctatatactttgaaatatacaatattttgttgttaactgtagtcatcctctgggctatcaaacattagaacttatttcttctatgtaactgcatttttatacctattaaccaacctgtcttcattcctcctctccagtcttctttggtattagtagagagcagaatgatagttaccagagactatcattctaccattctctcattcttccatgaaatctatgtttttagctcccacatagtaagaatatgtgatacttgtcttcctgtgtctggcttatttcacttaccgtaataatcttcagttccatccgtgttgctgcgaacaacaggattacattcttttctatggctgaatagtattcccttgtgtatatatctgtttatccttttattcattgatggacacttaggctgattttctctcttctcatggctggcttctcatcaccctttggtcctcctgtatcctctatgtaataaagctcttccccaatatctcgatagatactttagtcctttgttatgttcagagcacttttctagcttgatataatttcaattatgaggctttttccttttttcttgttctgctgaaaagaaactctgaggcctggtccagccaggattccagccaaggtcttgggcacctgaagccctgtattccctctgtgccatggctgctgacaacattggattgtccttgtttgtaatactctgtaaattaatgcatttgttatcagattttcattgtagtattagaggatgcaacctgaatatttaaaaagtttcaatagtatttagaataacaatcaataaagagttacaacaaagacccaagtcaaaatcagtgccatatgctagccctttcattctcattatggaacttagttctgttcatatatatttgtagagttttttttccgtctaagattacattatgaagagataattgagacagttttattttttgtaatccaaaatgtaccttacaattaaaatttaaaaattgctcagaatattaaattggattcttagctgataaatgaatacagcatatttttctccttcatcagccatcatgtccagcctgtgggacacttgaagccatttaaaatgcattggtatgaacttttagaaaatgttttcatagttgtatattaaggggagagtcatctgagatgaataaatattgagaaaagtatcagggagtagatgtattttagtactatactaccccttttttaaaacagttgtgaaaacctctcggactaagtaaatgtcatatcaataacattaacatccctggaatattttcatagaggaactcacagaaatccttggaaatagatggatgcattggtctccgtttcgatgacactgactagcattaaggataagattctatcacttaagaatttactatattgagtatctaagagcccattgccactttcagtgtgatttatcagcatgattcaaactatataaaatgaattcattcttcagttggtcaattttatttgcccgatttattgaatggttccaccaactacgaggaaggacagtcagttctttcttctttttgaaaatatctgagctttccctttctccttccttctgctgcttgcctcagggccatttcatgctgaaaagctttggattgatttctgtgctcactggtgcttccatttaccatctgttggctgaagcatttttatatttagaaacagaggaaggatagcccgtgataaattggagaggtttgaatatatagcaactatcaaacattttatatgaacaaatagttattcctaatacatggagagttgtaataagacgtgagattttaagatcatgggatagctgaaaaagcactgaagcaaagggaaaaccaatgactcaaagaatgtgtaaagaatgttagcatacactggagtttttaaaactagagtttttttttaaaaaaaaactttactgatcatcttaaaaactgttaacttgtcaaaaagtttattattggtggaggcaaatgtgtgcattaaacctgactgaaaaatattgtaaccctgtctcgtgtcttgatcagtttattgctgccttgagagcatgaagagcttcttagtggagtattaaaattcacctgtattaagagaaggcaataaaatgttttaatttaattgtgtaaatgctttgtaattcatgagttgtgtagattaatccttttaaaagcatattggaaagtaagcatcttagaataatgtgaaggtatcattctggggtccgaacaactccaaaagaagaacttgtagcatcttttgttatttaagttactctctgaggttttcacacatacacacacacacacactctctctctctctcacacacacacacatttgaacaaccagtgaaaagctcattcattattctgtctgtctggatttttttggcattctctttcccttagactcccctcgcttcttccgatgtttcaccttatttttctgcgcttcccttctggttgtcctgtgattctgtgcacctccttttggtggactctggccaatgtcaaccattgttcccatgatgtttactacctcagttaaatcaagctgcagctgagctctgcttccaagatttcttttcccatagcagtaactgctcccacaaagattacatttacctaatatgtcagcatctggaaaatctgtggaggttacagcttatgatccacagttagagctctgacatcagcaagtgcatgaggcagtgaagaggaaggaactcaggacatcaaaaacaatacccatgggaagcatttgacccaccctgtctctgtgtcccctaaagggattcagaaaaaaaaaattccttaagatttaatctttagaagaggaggatcagaatagaattatgagaatttagaaccaaagaggaccttagagattatatgatttatatgctccttatcctagtttaatgatgagaacgcggataatgaagacaagaacaaacaaacttggcaacttttaattttctggattttttatatagacacaatttgaaacttgaataaagttagttttttgtttactgaccactgcacttataaactggaaaaactgtgtgtgtgtttgtgtgtgtgtgattgtgtatacgtgtgtggtatatatacaaatatttttgttagcatagattttgaaaatctttatctacttatgtagcaaaattaagattgtttttgtaggcttgactatagaataatagacatattatcatgcaatttgttcataagattaatacataaccatacaagaatatattatgctgtaactcatagttgacatagatttacattgtataggtacttaatgatatagttatgaatttagctttgcaatattcttagacatttggaagccaatacatattctctaccccaggtctcaagcattgttatatgccctcagaaaatcagggtgcttaggcagtgtgattgtattgcctagtaagtaaaatagtcttgaatgtaatatattggaaagagatctgaactaagaaagagaattgatttcatgtttgccaccaactaaatatatgtcctctggaaggccacttttcctatgtggacctcatctgaaaaataacagaattaaaccaatcatctttatatcaattccaactctaagatactaagagactattttgaaagaaaaaaaaaaaaaaaggatattccagtctcatttttcaacggacaagcttgcttagtcaactcgaactaaacagaatattgaattgaaataggatttgcagtttctactatatatctctttttaaaaattagtgagttttaaggctcagataaaaatatcataaactccctttaagaacatctagttttcatttattttgagattttctaatatgattgataaatatcttgcgatatagacatatactatgtatatatacacgcacacacatatgtgcatgtatatatatacacacacgtgtttttgtatatatatgtatagtatatgtatacatcttgagatacatatgctatacatcttgagatacatgcatatactatacatcttgagatatatacatatactatacatatatacacacacgtgtatatatacacgcacatgtgtatatatgtatatacacatgtgtgtgtatatgtgtatagtatatatacacacgtgtgtatatatatatgtatagtatatgtatatatctcaagatatatatcttgagatatatacatatactatacatatatatatacacacatatgtgtgaattaggctgtcatttcattgtacttttatttttattttgtactatggttgataaatatcttgagatatatatattatatatatatatgaacttaggcagtcatctcattattgtacttttatttttttttgtgctatctacttttattttttttctttacaaaagtttaaaatgtgcatagtatctggataaaagccactgtaagttctattttccctgagaaagggactgcccaactacccctataaatgccaagtagagcaccccatattagcagctgatatgcttcctatgcaagccttgggggcctggctatatgatgacaggggttttcacctggggaatacgcctgttatatataacatattaaaagtagatagtttttaaaaggccctgatatgggatggaacatggagtgttcccaacactaacagcagcccaggaagagaggtagtcagcagggagatgtgtgaaggaggggtttgggaaagaagactggacccaggcagtcttaaaagacatgatatagatttatcaacttaaattaacaataatgaaatgactgcctgagttctaatatctctacatatctctcaagatatttatcaatcatattagaaagtctcaaaataagtgaaaactagatgttcttaaaggtagtttatgatatttttactggggcaatgttgagataagttaatcaaaataaagatcaacaaaggaccttcttcctttagctcaacccctggtaagaacccaaattctttttcaccagagagggtaaaatggtttgggggtagaaaaaaaaagattcctgggaccagaacataaaatataaaagttgataggattatgaaagttaacatatttaaacacactttgtataaagtagttgtatctccatcacctaaatgttttctgggaataaatattgtatatgattagaggatgttccccctagggcatggtaagcgctgtagttaagggggcctctagcaggcacctgttacttaggtcacggcaagtgctatggttaagggggcctcttctatgtgggcaccccatgttgtgatgttcccttggaggagccttatcaaatttggtgtctcagcttttcctcatgggtcttatagatgctaataaaacattaagttagttaaaaaaacaaatggagacaaaatggagagtcaaaggattcatcccagggaggtgaaaatctttaaatggttatttttttaaataaggtaaatgaaaaagaacacattgagagggataaaactaaaacgttaaaaaaaaggggggagggaagtcatgggactcatctcagaagggtagaaaatctttacttggttactaggaaaccgaatgaatgaaaggaaaattgatgggattaaaacaaaagtcttaatacaacactacttaaggttgggtggaccaaagagggtccttgctggtcccccaacattaaaagcgtacaagccagttttctctatttacttctgattagaagaagttcttaataataatcagaaggcaaagactggaatgagaaagctgaccaacaattgcttggggcaatgttgagataagttcatcaaaataaagatcaacaaaaggaccttctttgtttggctcaacccccctggtcagatcccaaattctttttcgccggaggggataaaatggtttgggggtagaaaaatttaaaaaaagattcctgagaccagaacataaaatgtaaatgttgataggattatgaaaattaaaatattgaaacatgctttgtataaagtagttgcgtctccatcacctaaatgttttccaggaataaatactgtatctgactgagggatgttctccataggaaggcccataaatctaccctcccagcaactttcttttcttgaggctttatgtattattgtgtttctttcattttttgaacttatatttacaagtgggagtgacgtgccacaaaacgattgcaaactctgttcacgggtggattttcctagaaggtgatctggattggctgtcctgctagggaaccccaaggagcctgttaaactagttggtttcttcaaagagaaattttttcatttcctttatacaagttataattctagttgccaattggtagatctgtgtgtaaagagatctagtgtggtcttgccattccctgtgtagactttaattgttctcagtatgtcaacttactcttgtcagaggcattcaaaccagagtcactccatcctgaataggggctggataaaataaagctaatacctactgggctgcattcctaggtggttaggcattcttattcacaggatgagataggaggttggcacaagatgcagatcacgaagaccctgctgacaaaacatgttgcagtaaagaagccagccaaaacccaccaaaaccaagatggcaacaaaagtgatctatggttgtagtcactgctcattatatgctaattatactgcattagcatgctaaaagacactcccaccagcaccatgagagtttacaaatgccttggcaatgcccagaagttatcctatatggtcaaaaaggggaggaaccctcagttctgggaaatccctgcccctttcccagaacactcatgagtactccacctcttgtttagcatataatcaagaaataactataaatatattcagtcaaagagcccctgccactgctccacctgtgaagtagcccttcttttattcctttactttcttaataaatttgctttcactttactctatggactcaccccaaaatctttcttgcgtgaggtcccagaaccctctcttggggtctggattgggacacctttccggtaacactctcaactataattgccgtccacttttatctacttctctacaatataaatatctaatttctgccagggttcagtttagtctttttactagtggatcatttttggagaaggaatttgggagctaaactgcatctcatgtagtctctcaaccaacacttatattttcagtcaacaaccccactttaaaaggtatcaatgcctccaagttttgagcatttcttggggcctatagcacaaataatactgttttgaggttctgttattgcaaacattgctttttcaccatattttgttagttgttagatgtcactaatccaccagctctccagtttccaaaatactcttgctcttactttttctgcctcctttttatcctccttataaatttgtcatttacaatttttttttttttactgtcatttatgtggaattttggggggaaatagaaataaacaaagtttcaattcaccatcacttgcagctatcattctttaatgtaatgcaaagatctcctttattggaacttcaaaaaaatattttaaaaagtatgtaatgtggccaggcattgtggcttatacctgtaatcccagcaatttgagaggccaaggctggcggatcacttgaggccaggagttcaagaccagcctggccaacatggtaaaaccctgtcgttactaaatataaaaaaattagccaagcatggtggtgtgcatctgtaatccaagctacttgggaggctgaggcacgagaattgcttgaacctcagaggtggtggtttcagtgagcggtgatcatgccactgcactccagcctgggtgacagaacaaggcttggtctcaaaaaaaaaaaaaaagaaaaagaaaaaagaagtagatgaaaggatgaatgaatgaaaataagcctactttatgtaatacaatctgataaacacttagtataagtgtctacaaatatacacagaagatgtatgcagttgctttaaagtaatagatcatttctatatttctaacgtgtgcttaaagctaaatacagatttatacaaatgctagcgtctaagaatggataatgctccaatatgcaactgtgttttccatagctaactgggtacaaattaccatagttcatgaagaaaatattttattggcatgtgccatgtactaggctatttgctgagaatacattgttgaattaaatataggtcctgccctcaaaaaatagttcatgctttctgtgatgtagtgtgatatataaattctgttgacatttgaaaaacagaaaactactcatttaactgctttctcaaagaatatgtcttcaatatttaaacaacaaaatttactctaatagtaattgcatcctgtgtcaaattgttgaatccctgtagatgacatagtatctggattaaaattcactgacacgagctaaggacctactatgtgttagactttgaggtgcttttgcctaccttatttaatcatctaagcaatcagtttctgtaaatagaattatttctttcaggcagaagaaatgaaatcccaggttattaaaaagaatgactacattatgttgtgggagcaaagagtaaactgcaaagaagaaaactacaaaatttcagtggctttaaacaaaaaaataattcctcatgtatacaaaatgattaatgagtttgcctttctcactcagggtccttgagtttactctctagaacattgctgattatggtagaagaaagcaataacctgcttgaccttatcctatagttactttaacctataaccatagaatacaactggttatatgacttatcctaattttaaggggtcagtgatccccttcttcccgcctataaataaatgtaaacctgacattggtgaatagttgtcatgcttagtgggcctggtgggtacttcctaaccagagcttaaaacagactgccatatatatggcaggtaccttctgcatatactggcttcataatcaaatccaatacttcccaaacactgtcctcaaacactggaccatgactgcctgtacttaccagacacaaacctgggatgtcattgagaaggggattctgggaaacgtagttccagacctcttctctgggatatgtagggagacatagaagcaggtgggggtaatgaagcattgtagcacactcaggaaaattaaacaaaacatcttaaattccaacaggaaatgtgtggccacacatcccttatgagaccaatgttctataactgcaagttcaatattatttttattatgctggtgtttcttaggctttattgcaattataataacaccttaccttgctatttatatccttttaaatttttgacattattttttgcttagaagcttttttttaaaaaaaaaaaatcagtgcatgagaaagtaaaagacagcgccaacttaggaaggaccatggtcccagacagaaatagcagtacccagaactagaagagagaatctaggaatactaaggcaggacagagagatgtatccctggtcccatgggaatgagaaaattagcaatttggattagagagtgaacagttgaaaagcagacacacacagggttcctgatattctgccagaataagagagcttgaaaccacgaaggaaagttctgccaaggatgagatgggaatagactgacatttgaaattcaatgtatgagatgatgatggacctgggagagccaggccaggtctgagaaagcagtgctggtgttgagaagtggatagatccttaggatgggggatagaggttgggctaagggacagagttggctagggaggcatggaatttgaagttaaaattatcatgagagatggtttagggaaaggtgataaaggaaaagtgtgggttaatattatatgggccttaagttgtttttggggtgaggagtaagagatggtcttgtgactggggtgtggtggctgaagcagtgaggacctgggatgctgctgcaggttagagagaaagtctcctacatcatattagagcagtgttgggttgggagatcctgcagtagcaggcatctctgctcttctgagctaggaccttgaatggaccagcttctgttaaaactgggcaaggaaagataacatgaataccattttcttcttttattttcttcttagtgcctcatggttccctttcacatcaactccagtcaaggcaataaataaatagtgtataggtaatatcttttaataagcattagtttaacaacatgtgctctctgatactaagtaaaatattctttaacatttttgtggttgcaataaataaatgggaaaatgtatcaagaagattctaaattgctcatttttttacctttgtttttagattttactccttaattgaaactgatgaaaatattcaaaagtttagtcaatggagtgtatgaatattatttcaatttatgtaatgcacaatagaaatatgcttagattatttttaacaaataacatggtagaaagtgctatcaacttttaatcaacagaactcagctatgaatatcagtgtgtgtgtgtgtgtgtgtgtgtgtgtgtgtgtgtgtgtgtaggataagggtattttccctgccttttcttttctttttatttttcttttgaggaagcaagactgaaattagcactaaaatctggaccatttacaaggttgcttggctttatgaagattgcagatatctaggccttgggatccggtgccttaatgcatcttgttttaccctgagaggcacctccttttttagaaatcttgtcctttcaacaaaggaaagtcactgagtggtaatttaatcttgaaaactagcttggattttctggcaacaaaaaaagagaaaaacagtattggaaaaaaataatacttgcaactaaaagctggagaggaagggggaaagaactccttgaaaacaattatgactcaggcagtttcatctgttaaaatgcgtggtactaggtgaaagagcttgagcattgtgggatcttgtcaccagctccaattagggaccagcccagaggtcaccaaaaagagaaggtaactcacaaaagattttcctctttaagaatatttttgttttttactgatggaagaatgagttatttacttgtttttctaggactgcaatatttttagagataagaaaaacagcacaataacatttttattgctctggaataaggcatgtcacatttttttcattggatgtaatcacggtgttaagaatctgattggattgtggttgtttttgctattgtcactgaatgtcatattggcaacatttaaaagccagatgtgtcaggaagtgatgtggaagggaactactcaaaacaaatgtgcgcagctgacttttaaaatatttatgcttttttaaacagaaagattatacttttcatttggatgcttcttaaatgatttattttttgtaatttactcagaagtagtgtattagtctgctgaggctgctataacaaaataccacagatggggtggtgtaaacaacaggaatttattttctcacagctctggaggttggaagtccaagatgaagatttaggccattaagttttggtgaagtgtctcttcctagcttgcaggtggccatctcattatatgcgcatgtgacttccctgtagagaaagggaaacctctctctccttttcctataaggccaccagtcctattaggccccattcttatgatgtcatttaaccataattaattattttctaaacaccctatttccaaatacaatcacataaggggttaaggcttcaaataccaattttgggaggacataatttaatccaaagcaagcagcttacactaaaagtgttagtgtcataataaagacaggggtaagatgtgaaaaatggtgactattcttagggttctaggcattcttttcagagtagccctttccatttacacacacacacacacacacacacacacacacacacatacacacacacatttagagagaaagacagagtagattgttgccaatgatggactataaaagttgacttctttcttgaaaatgcattcgtatgaaaatctgaaagtgactccaaagatagcattagaatttgcattgcatggctattgttaagcttaagatatacaacaccttacatttaggtttcatttactattttttaaatctctctccaggcgaaatattttgtgtgatccttgcaattcttctgataggaaatctgtccttaggccttggctgtgtggctgagggaactgagtaatagcatagtagagacagcagtaaatacactgtaaaattagaagttccagagagaagctccagctcttcacctgcaggaggttaaattagtaatctgggatatgggactctctctcaaacatgagggtgttgtattgaatgaaattccaaggcttctccttgttttaaagttctgtgtttctatgaaacactaagaaaatgaagagatttgcttttagccacacagtgaattaataaaagttatgaatttaaaactatgtttttctgacttgcagctcatggaattttgcagaaatatcaaagctctagcgtcaaggttcctcaccctaattctcttgacatcattggagtcttatgtttcgcttaacttcaatggttaaaacacagaaaggacatctccctttaaggcttagtaggagaaaatacctgttttctgttctatagagagttgtgtcttttcttagaagagaaaaaaatgatgactgcagatgtttaagagggcggctataaatccagtgagctataaacaagaattgtgatgagaacaaaacccagtgcccttatagggaaacccagacatgcaaagatttgtacatgcgccttgggctatggttgagtgttttaaagctgcttgtggtggtgctaagagtttgtctgtaaaatgagacatgaatgatatctggcagagctgaagctcaaagaacaatctgaggccgcttgtgtttacacttgcacaatgatagttgtaagcagatctttttaaacaaggcagaacaatttagaaggattaagagatctaaactaagcagagtgtgtgccacaattttcttcctttctaaagcttcttgaaattaagctccccatggtgataaacctagaagaaagggattttgagagttccttttaagaaatttgctccctatgggatcttgttgcttgttccttgagtttataatgtcacttcttttgttccatggggctaatccattttggttattttccatgaggtagcaaatagtttcaatgaggtggctccctgaggctaaggtaaaagggcacatagattttcagtctcattctttgtttacatatgttcagaatataatggaaaatgtccttcagttcataaatcatccttgttttgtctccattccaagataaatttagtttaggagaagttgcaataccattctctgtcacttttgatttatgttagaatgaaagaaaaactccaatggtggatcccttctctactgctgtcctgggacttcatttagtattagggttgcctttccagtgaaaccacataattagtcctttggctactatattgaacaacaatctcaatttctcacattcacccaatgtgggggagaaacttcagcataataccttttgctgcttggaaagagcacatatgttttgatacatcaaattggaagtcactcagaggagagtcataagtccatgactaagctatatatccagatgtttcatcactgagtactttaccctgaataagagcatggctcagaatattactatatataaaaacataggactgattagcaggttcttgtggacagggaattctatatatttatacatatataatataccttatactaaccatataattacactcctataatacaagtgataaattaatatattatatataatagaaacaataaaattagattattgtcataatattcatacaattatgtagatctcattcaatgaactgttttttgagtaattttattaatttagctctcatgttgacactgctaaagatacaaaagaagggtatgacagtccccgattcatccagaactcttaaaatgaaagtgttatatatggttccaccaggctagagggatataatacagctaaatcgcttgaataatttttttttttttgagacagggtcttgctctgttgctaggctggagtacagcagtgacattacagctcactgcagcctcaaactcctaggctcaagcaattaggctcaagcgattctcccacctcagcctcccaagtagctgggactgcaggcacatgccaccacgcccagcaaatctgagtaattttcatcaagaaaagaataaatttgcgatttactttttcaatgtgattactttttaagattgtcaatataaattgatgtataacattttactgccccaatagctttctctctctctccctaccttacccgacatccctgcatctttcttttcatttcttttcttcttttttttattgataatgttctaggcaacctctggtgttatgcggagttaggtagggcaggtaggcttcaattgcttctgcctcaccacatcagtccccctaagtagttcagagacctttctgtatgttctttgttactgcccttcctaacatgaatgctcagctcaactttactacagtgagtacagttgccttcttctatcatattgatatggaagggaagtgctgggaagggaagagtgtggtccctttaaatgatacagaacagggaagggaagggcatggtccctggctggggctccatctcccaggcctgtgcccacagacctaggtgaggacaggtatttttgttttccagtccagatatttcatttcccaagaccactctgacctgccacgccacccatcttgtgcctatgaaaactctggagaccctagcaggcaggcacacaagtggctggacatcaagaggagcggatcggtggaagaagatacaggtagctggacgtcgagagcagcacatcagtggaggaacagatgggcagttggatgtggagaggagcgcatcaacaggcaccgatacactggcaggccaccgaccagcagaagaacaatgcagagtttgacttggggcagtaggaggagagcccagtgccatgtggcactgagaagaatgtatatactgttgatttggggtagacagttctgtagacatctactggtttcacttgatccagtgctgagttcaagtcctgaatatccttgttaattttctgtctgggtgatctgtctaatactgacagtggagtgttaaagtctcccactattattgtgtgggaatctaagtctctttgtaggtttctaagaacttgttttatgaactgggtgtcctgagatatcctgagatatcttgtattgtgtgcgtgtatattcagaatagttagctcttcttgttgaattgttccctttaccattatgtaatgcccttctttgtcttttttgatctttgttggtttaaagtctgtttcttcagagaccaagattgcaagccaagcttttttatttgctttccatttgcttggtaaattttcctccatccttttattttgagcctgtgtgtgtcattgcacataagatgggtctcctgaatacagcacaccgtgggtcttgactccttatccaatttgccaggctgtatcttttaattgggtcatttagcccatttacacttaaggttagtattgttatgtgtgagtttgatcctctcatcatgatgctatttggctattttgcacactagttgatgcagtctcttcatagtgtcattggtctttatatattgatgtgtttgtgaatggctggtactggattttcctttccacatttagtgcttctttcagaagcccttgcagggcaggcctggtggtaatgaaatcccacagcatttgcttgtctggaaagaattttatttctcctttgcttatgaagcttagtttggctggatatgaagttctgggctgaaaattcttttctttaagaattttgaatattggtccccaatctcttttggcttgtagagtttctgctgagaggtccactgttagtctgatgggcttccctttgtaagtgacctggcctttctctctggctgtccttaatagtttgtccttcatttcgaccttggagaatctgatgattatgtgtcttgcggttgactttctcatggagtatcttaatagtgttctttgtatttcctgaatttgcatgttggcctgtcttgctaggctagggaagttctcctggataatatcctgaagcgtgttttccagcttgtttccattctcctcatctccttctggtactccaatcaattgtaggttcagtcttttcattgaagtcccttatttctgggaggctttattcattccttttcattctttttcttgtatgcataccttatttcagtaaggtggtcttcaaactctgatatcctctcttctgcttggttgattcagctattgatacttgggtatgtttcaggaagttcttgtgctgtgtttttcagctccatcaggtcatttatgttcctctgtaaactggctattctagttagcaattcctctaacctcttatcaaggttcttagcttctttgcattgggttagaacatgctcctttagctcatcacagttttttattacccatcttctgaagcctacttctgacagttcatccatctgttcttccattcaggcacccttgatggagagatgttgtgatcatttggagtagaagaggtcctctggccttttgagttctcagcatttttttctttgattctttcttatctttgtgagtttgtctagctttggttttgagtctactgacccatggatggggtttttgtgggggccttttgttgttgttgatgccattgttgctgctttctgcttgtttgtttttatttcaatagtcaggtccctgatttgtagggctgctgcagtttgctggggatttgcttcaggccttattcatctgattcacgttccccatgtggctcttaggtgggccaccgcaccacactgttcttccttctcttcatgggtcatgccagacttctagtcaattttgatgagagaaactggataccttggttgccagtgaaggattcacatgcatattatggtatttttcgatgggagtctctgaacacagctgcttctagtctgtcatcttggcctcaccaatattgctgattttcatttagctgtaaaaataacatcatttcctctaattttaagaaaggacaatggggaaaaagtattttgaatctatcccatgtgttcccattataaatgttctgatggttaataccaagtgttaacttgattggattgaaggatacaaagtattgatcctgggtgtgtctttgagggtgttgccaaaagagattaacatttgagtcagtgggctggggaaggcagatccatccttaatctggtaggcacaatctaatcagccaccaacaaatataaaagcaggcagaaaaatgtgaaaaggagagactggcctagcctcccagcctacatctttctcccatgctggatgcttcctgccctcgaacataggactccaggttcttcagtttgggacttggactggctctccttgctcctcagattgcagacagcctactgtgggaccttttgctcatgtaagttaatacttaataaactcccctttatatatatatatacacacacatatatatacacacagaggcatatatacatatacacacatatatacatatacatatatacacacatatgcatatacatatatacacacatatacatatacatatacacacacatatacatatacatctacacacacacacataggatatatatatatatagaacatatgtgtatatataggatatatatatagatatatataacatatgtatatataggatatatatatagatatatataacatatgtatatgtaggatatatatcctattctatccctctagagaacatatatatatataatatatatatatataatatatatatgaaaaacaaacaaggaaaaagcaacaacaatggcatcaacaacaacaaaaaggcccccacaaaatccccatccaagggtcagcagcctcaaagaccaaaactggacaaactcacaaagatgagaaagaatcaaagaaaaaatgctgaaaacccaaaagaccagagggcctcttctcctccaaatggtcgcaacatctctccatcaagggtgcagaactgaatggaggatcagatggatgaataccaaaatctgtatttgtcagggttctctagagggatagaactaataggacacccctctatagaaccctgacaaatacagatcttggtcccgggaggcattctagacaaatagaatattaaagatggagttcttttgttggttttggggtttctggagttggctgcttgatatgattagagcccaaaatgctaaggactctacttctaacagtatggagaatactgatagtcattggcatgaactatttagagagttttgcaaaataaatgcatttgtcactcttgattcactgcttatgagaggtgaggagtttagttacacaatacctttgatcatatgtggagaaccaaggaacgtaatgaagctggttggttgctcctaagttcagtggacaaagtgataaaagaaaatgatgaactcaaggattctgtctcccaatttcagaagcagatactgagcctcaaatctactaagattgccctgagtatctcctgtagagaaagagttcaaactgtggaaaaacagtcacaagctcttatcatgcgagtggctgacttgcaaggaaaagtgcatgcgcagccttgccaggtgtctactgttaaaatgagggcattgattagaagagaatgggaccttgaaacttgaaacattcgtgaatgtgtaggaggaccctgatgaagctggggacactgagtttgtaaactctgatgacccttttctatttgccagaaggaacagcttccccatccccagtagtggcaatatccactcccctccccgacccatgctaccatcatcctttccacctttgtctgaggaggtaaaccctgtgttgcctgaggcaacagtaatggcctcccctgaggcagttgccaggcaagataatgttgattatcctcaggagccacccccaacacccttgtttgcttctagacctataactagactaaagtcctggcaggcccctagaggtgaggttgagagtgtgaccaatgaggaggtgtgtgctatactcaaaaagaactgtttatctaatttatatgaacagaaatcaggggaacagttatgagaatgggtattaaaggcatgggataatagcagaaagaacatagagttggatcaggctgaatttattgattttggccctctagttgggactctgtttttaattttgcagctcagggagttaagaaaaggttctcaatagtttatttgcttggtaagctgaaatacggattaaaagatggcccactaggagtgagctggaaatgcctgatatcccttggtttaatgtcaaggaagggacccaaaggcttaggaagattgggatggtggagtggattcgtcactttagacttactcatcccagctgggagggtccagaagacatacccttgaccaaggcatttagaaatagatttatgagggcagcacctgcatctttgaagaggactgtaattgctcttctctgtatgtgagatctaacggtgggaactgcagtcactcaactacagaatgtaaatacaatgggaataattggattccgaggtggcaagggccaagtgacggcactcagccatcaaaggaaggtgcatgtggctactgtaatggacagcagaggcaaagcagtaatcagaatagtctgacttgtgtagagctctggcattggctaattaatcacagtgttcctggaagtgaaatttataggaagcctactgcattcctacttaatttatacaagcaaaaaactgctaagtgaaatttacaaaagactaatttgaattataaaaacagtgtcatggctcctcagtcaatttccagacttgagtcagtttacagacctagaaccccttgaatgaaggggaggcagggtttcctctaaattactgacaatttgtgcagtgaatctctctcccatccttcccttcatagacctctggccttttagcaggctaaagtgcactggggaaagggaaatagtcagacacttgggggtgctactggacactggctcagagctgatgttgattccaagggacccaaagcatcattgtggttctccagttagagtaggggtttatggaagtcaggtaattaatggagttttagctcaggtctgatgtacagtacatccagttggtccctggactcatcctctggtcatttctccagtggcagaatgcataattggcatagacatacttagcagctggcagaacccccacattggcttcctgactggtaaggtgagggctatcgtggtaggaaaggccaaatggaagccattagagctgcctctacttagaaaaatagtacgtcaaaaacaacgtcacattcatgaagggattgtgaagattagtgccaccatctaggacttcgaagattcgggggtggtgatttccaccacatccacattcgactctcccaattggcctgtgcagaagacagatggattttggagaataacagtggattattgtaagcttaaccaagtggtcactcaaattgcagctgctgtaccagatgtagtttcattgcttgagcaaattaacacatctcctggtacctggtatgcagcctttgacttggaaaatgccttttttctccattcctgtccataaggcccaccagaagcaatttgccttcagctggtaaggccagcaatatacctttactacctcagtggtatatcaactctccagctttattcagagagaccttgattgcttttagcttccacaaagatatcacactggtccattaaattgatgacattatgctgactgaatccagtgaataagaagaagtagcaaacaaattggacttattggtgagacatttgcatgccagaggacaggaaataaatccaactaaaattcagggaacttctacctcagtaaaatttctaggggtccagtggtgtggggcttgttgagatattccttctaaggtgaaggataagttgctacttttggtccctcctacaaccaagaaagaggcacaacacctagtgggcctatttggattttggaggcaacacattcttcatttgggtgtgttactctggcccatttattgagtgacccaaaaggctgccagttttgagtggggtccagaacaggagaaagctctgcagcaggtccaggctgctgtgcaagctgctcttccacttgggccatatgacccagcagatccaatgttgcttaaggcttcagtggcagataaggacgctatttgaacatttggcaggcccccataggtgaatcacagaggaggcctcaaggattttggggcaagtccctgccatcttctgcagataactactctccttttgagagacagctcttggcctgttactgggctttggtggaaactgaatgtttgactatgagtcatcaagttaccatgcaacctgaactgcctatcatgaactgggtgctttctgacccatctagccataaagtgggtcatgggcagtagcatcccatcatcaaatggaagtggcctatacgtgatcgggctcgagcaagtcctgaaggcacaagtaagttatataaggaagtggctcaaatgcccatggtctccactcctgccaccctgccttctctcccccagcctgcactgatggcctcatggagagttccctaagatcagttgacagaggaagagaagactagggcctggttcacagatagttctgcttgacatgcaggcaccacccaaaagtagacagctgcggcactatatcccccttctaggacatccctgaaggacagcagtgaagggaaatcatcccagtggtcagaacttcaagcagtgcatttggctgctgtgcactttgcacagaaggagaaatgtccagatgtgtgattatatggtgattcttgggctgtagtcaatggtttgtctggatggtcaggaacttgcaagaaggatggttgaagattgttgacaaatttgggaaagaggtatgtggatggacttttttgagtggtcagaaaccatgaagatatttgtatcccatgtgagtgctcaccaacaggtgacctcagcagaggaggttttaaacaatcaagtggatacgatgactcgttctgtggacaccactaagcctccttccccagccacccctgtcattgcccagtgggcccatgaacaaagttgccatggtggcagggatgaggttactcatgggctcagcaatatggacttccagtcaccaaggctgacctggctatggccactgctgagtgcccagtttgccagcagcagagaccaacactgagcccttgatatggcaccattcctgaagatgatcagccagctacctggtggcaggtggattatattggacgtcttccatcatggaaagggcagaggttggtcatcactggaatagaaacttactctggatatgggtttgcctatcctgcatgcaatgcttctgccaagactaccatccatggactcatggaatgccttatccactgtcacagtattccacacagcattgcctctgaccaaggcactcactttacagctaaagaagtgtggcagtgggctcatgctcatggaattcactggttttaccatgttccccatcatcctgaagcagctggattgataggacagtggaatggctttttgaagtcatagttacaacgccaactaggtaacaatactttgcagggctggggtaaagttctccagaataccatatatgctctgagtcagtgtccaacgtatcatactatcaaactgtttctcccctagccaggattcacaagtccaggcatcaaaaggtggaagtggaagtggcaccactcaccatcacccctactggtccgctagcaaaatgtttgcttcctgttcctgtgacgttacattatgctggcccagaggtctttgttccagagggaggaacactgccaccaggagacacaacaaggattccattaaattggaagttaagattgccacctggacactttgggcttctcctatcttcaagtcaacaggccaagatgagagttacagtgttggctggggtgactgacccagagtattaagatgaaatcagtctactactccacaacagagataaggaagactatgcatgggacacaggagattcattagggtgtcccttagtattaccatgtcctgtgattaaggttaatgagaaactacaacagcccaatccaggcagtactacaaatggcccagatccctcaggaataaaggtttgagtcactccacctggtgaaaaaccacaacctgctcaggtgcttgctgaaggcaaagggaatacagaatgggaagtagaagaaggtagtcatcaataccagctatgaccacgtgaccagctgagaaatggggcctttaattgttatgagtatttcctcctccttttgctaaaaatatgtttgtgcatgtatacacttgtactaagaaaatatctttatttttttcttttcttttatcatgtgatatgagatccattgacttcatatcagcctttaaatattgttaagtttatgtaatagcatttgagttggggattggtgtgtttccggctgtacaaaggatagttgtattatgttaggcataattatgaccttattgttgtcttcatttgaagattatgtatgatctcaggagatgtgtatgggttcaagtttacaaggggtggacttgtgatggctaataccgagtgtcaacttgattagattggaggctacaaagtattcatcttgggtgtgtctgtgaggatgttgataaaagagactaacatttgagtcagtgggctgggaaaggcagatccacccttagtgtggtgggcacaatctaatcagctgccatcaaacacaaaagcaggcagaaaaacatgaaaaggagagactgacctagcctcctagcctatgtctttctcctgtgctggatgcttcctgctgtcaaacacaggactccaaattcctgtttggggacttggactgtttctctttgctcctcagcttgcagacagcctattgtaggaccttgtgattgcgtaagttaatatttaataaattcccctatatatatgtatacatatatatgcatatagtgtatatatacacatatatatgtgtatatatacacaaatatatatatgtgtgtgtgtgtgtatatttttatatatatacatttcgtattagttctgttcctctagagaaccctgactaatacaaaagtattgcttataagagttctttaggtctagcccaagtgtgattttttatgggtttactgtcaaaatttctgagtcacttaaaaaaagaatgttctcaggtcaaaagcagagacattatttttgtaagctttattaattgctttaaatgattcaatgttttattttgcttcacatttgtgattttaccttactgtgcaagttttaaaaaatgtttttccaggaattttgaagtatttttctttttattgcattatttgcctatgtcatatttttaagtgtttttccaaatgttcatgcattccataaaggggaattcccctttcattcccagataactctataattctatctgggaatcctgtttttttttttttttctctctctctctctaatatgcactggttgctctttagtccagatatactgatgttttagtatttcctttattgctcttcaagttcagatccactgtttttgaattctatatttttcccttccttagtttattaccttatttgtgggaatatattctcaagttacttcttaggaagatataaatggagataaactctctacttacatgtctgaaaatatctgattttaccaccttcattggtagtttgattggggagacattacttggttttatcagtctagatgtttttatgctgcttcaacaaacagctcacaaatctcaattatttaacataaaactttattttttagtaaagatacatgtctagtgcagattggaaatggagctctgctcattatggttcaattcagtgggtttggatctcaacaaatgattctgcaattaccatggcagagaaaaggaaatacagtatactgactcggaaaattccatttgaaagtgacacatttatctcatttattctttattggccaaacaactcacagggccacctttatcaaggcaggtaaaagggaggatgacacatcatgcaccttctaccttgaagtgatagatgtggctatcactcatacttaactggccaacactacgtttccacatttaatattaaagaggacaaggaagtgtaattcgcctgcctagctaggagaggagaattagatcacttgtgagtagtcactgcactacaaattgattaaaaataagttcatctttgattttcaaggcattattctattgcgttgtatcatccagtaaactttgagtgccgttcttttgtatgtgatctgttttacccagatagggtaagatttcaggattgtctttttatctctggtgttgtgaaacttgtgatatgactcagtgtgaatgttttaaaatttattttacttggcattaagtaggacttttaagacagaaagcttgcatccttcaattctgaataaatccttgaattatatctttgatgattttctctcctcatttctttattctctcattctagaactcatactagcttatgtaaagaagaaatagagctctgaaaatcttatatgtgagatcagaaaactgtgacagcagaaattcctgtaaactcaggtgaatgatgaagcaaaaaagatatctgtctcacagttagttaagtgccatgaagaagaagtaaatgaatcaggaggcagtataccatatagctttcttagcaaattctgtgactccatcttctcaacatctctctcatcaaaatattttaatcctaatttttctataatgggcacaaaaactgataaattatttttaaacatagaaaatagaagaaataagttccattactgtattgaaaattattgacataaaatgagaatgatacatgttacattttaagtaattacttataaatatatgatctaagaatcatattacattatgtattacctataccctgtgtcaattaagattatctcaagtgtaagtaaaaccaagcaataatggcagtagattaaagtaaaaagaaaattattatatgcttaataagaagtccagaagtggaggggcctagaattgttttggaagttttgccataatatcaaagaacacagctccttatagtgtttcatttcaccattatgaggcttatgtctctagtggatatgaaacatttattgtaatgatattatttgtatgggtgctagcaattaggtgacttaaaatgactaatatattttctagaggtcaaaattataaacttatgcctgggatcttcaccttaaacaaataaatgagccaattttgctgggacatatattattccagaccaactgaagcctaattaaatacaatgctttgtcagtacttagttctaagatgtgtttggaggccgggcacggtggctcacacctgtaatcccagcactttgggaagccaaggctggcggatcacgaggtcaggagatagagaccatcctggctaacacgtgaaaccccgtctctactaacaatacaaaaacaaaattagccgggcgtggtggcggacacctgaagtcccagctactcgggaggctgaggcgggagaatggcatgaacccaggaggcggagctggcagtgagccgagatggtgccactgcactccagcctgggtgacagagcgagactccatctcaaataaataaataaataaataaataaataaaagatgtgtgtgggaaacagcaatttccttcctcttcatcccccttttactagggaccagttgtaaggtcttcctcagcaccagtaagggaatgccatttatccctttgggatccaagagtttggataaatgctaacccaaaggtgacaggttctgtcctaaacatcaaatgccttgaagaaagtccagtttcactgtgttccaggaatcaatgccaagaacagaagccaagtacagttggattgacatgaaagaaattctattcttagggtgacttagcagcaagagtcaagatccatagaacctggaatagaataaagtgccagagatagggtggcaaaagttacagaatacatctgccaagaaaaaagagactgtctttcatttttgtaaggaatcattttccccacttttgcttctatttgtttaacaacaaaatgaacgtaatggtcctttagcctttaattttagaactaaaagaagataaattaagccataagacaaaaccagattaagaatcaccacagtggaaagggataatcagaaggttaaataatatgttctttgcacttaagggcaatactttgttttattaatgtatttatatctatttctatcccaaagtatgttgtattgtgcccatttcccttttaccaggtacatgtgtggactttttgagtggtattaccaaagactagtttattaaaatgttacttaagatgttggcagtattttagaaatctgaaacctatttcagaatataaagttgtcaaaggagcactaagtaagatgaaggaacatggattttttttacctgcttttgttatgaactggttatgtatattttggcaactgtgtacactccctagcccttttcagctgtaatgtgatggctttggaccagatggctctaaactctttccagttccaacagcaatgaatatgcttaggcttcctcttggttcacattccaccaggcaacatgggcgtgcagcacatttaactttcctcttcagcctggcataagccatagcttttggggaagaatgaaagcagctagtttttaccccactccttccttcttacttcatatgttttcattcctagaataatttcatgcatttctaaattttgcttcaacaagtcacggccagcacttcacctgaaacagcagagagcaccccacagtaaacaaaaatcacatctatacccacctgcttatgctgcagctggctgttacctgcaaatgtcatcttctgtcatgtaggttgaaccacacagcccaatataaaaccagctgacagaagtgcgtaggaccataacagcaaagccaaaaaatcccacccaacactttcccagatgagaagaaaccagcataagaattctgcctctgtgaaaaacctcaatgttgtgacaccatcaaaggttcactctagctccccagtaagtttctagccaaaatggaggcacagaggtgacagatagagagttcaaagcatggattgcagggaatcgcaacaagatccagggcaaggttgaaaatcaacacaaagaaacttctaaagcaatccaggaaataaaagaagagataaacacttaaaaaaaaatcaatcagagctactggaactgaaaacctcacttagggaatttcaaaatataattgaaagctttatcagtggactagaccaagcagaagagcttgaaaatcagtctttcaaactaaaccaaacaaaaataaagaaaaaagaattttaaaaaatgaaccaagtcttcgagaaaaatgggtttatgtaaggtgaccaaatctataagttactggtattcctgagagagaagcaccgaaaagtaaacaacccagaaaatatacttgagggaataattcaagaaaatttccctaagctggctagaggggtagacatgcaaatacaagaaatccagagaacaactgtgagttactatacaaaatgaacatcatcaagacctgtagtcaccaggctaagatcagtcctaaaaaaaaaattcttaaaggcagctaaaaaaatggtaagatcacatacaaggccatccaatcaggctaacagcatacctctcagcagaaaccctataagccagaagagaccgaggacctattttcagcattctcaaagaaaaggagcttcaacgaataatttcataccccaccaaagcttcataagtggataaatgaattcttttttagacaagtaatcaataaggaaattcattacaactcaactagccttacaagagagtcgtaagggagttctaaacatggagagaaaagacttatgcctgtttccacaaatcacacctaactacctaggccttttaaagcatctacacaatacaaactacaaaacaaccagctaacaacttcatgatagaataaaaacctcacttatcaatattaactttgaacataaatgatcttaatgccccatttaaaaggcacagagggtcaagttgaataataaaacaagatgtatctgtctaccatcttcaaggagtacatctctcacataatgaaatctatagactcaaagggttagagaaagatctatcatacaaacagaaaacaaacaataagcaggagccactattcttatatcagataaaatagactttaaacaaacaacagtaacaaagaacaaaatattatcaaaaatgttcaatctaacaagatgagttaactatctgaaatatatatgcacctaacatcggagcacccagatacacaaaacaagttcttccagagctacaaaaagacttggagagccacacaggaatagtgggggacttcaatactccactgatagtgttagatcacttagacagaaaactaaaaaagctattctgggcttgcattttacacttgaacaattggacctattaaacatctacagaacactccacccatcaaccatagaatgtaccttcttttcatctgttcatggaacgtattctaagattgatgatatgctcaaccaagaaggaagtgtcaaatcaaaaaaaaaatcataccaaccatactttcagaccacagtgaaataaaaatacaaatcaataccaagaagatctcttaaaaccacacagttacatggaaattgaacaacttgttcctgctcctggatgacttttgggcaagcaatgaagttaaggcagcaattaaaaacaatctttaaaataaatgaaaacacagacacaacataccaaaatctctggaatgcagctaaaatattaagaggaaagcttataatactaaatgtctacatcaagaagttagatctcgaattagcaatctaacatcacagctggaggaacttaaaaaaagaacaaactaaccctaaaggtattagcgaaaacaaataactgaaatgagatcagaactgaaaaaagttgaaaccccaaaatccatacaaaacatcaatgaaaccaaaagctgcttatttgaaaggataaacaagattgatagacagctagctagattaattaagaaaagtagagagaggatccaaataagcataatcaaaaagaacaaaggtgacattacaaccaagcccacggaaataaaaaaatattcccagagactattatgaacacctctatgcacacaaactagaaaatctagaggaaatggacaaatttctggaaatatacaaccttccaagactgaggcagggagaaattgaaactctgaacagaccaatataaagttacaaaattgaatcaatagtttaaaaaaaaaaaccttccaatcaaaaagagccctagaccagatggatttcagctgaattctaccagatttacaaagaacaggtagcaatcctactgaaactattccaaaaaaccgaggaagagagacttctccccaacttattcagtgaagccagaatcacattgataccaaaatcgggcaaagacaaaacaaaaaagagaaaggcacaggccagtagtccctgattaacatagatgaaaaatcttcaagaaaatactagctgactaaatcctgcagcacatcaaaagttaattcattgtgatgaagtaggcttgattcctcagagctggttcaatatgtgcaaataaataaatgtgattcaccacacaaacagaattttaaaaaaatattatcatgtaaatagatgtaagaaaacttttgataaaatccaataccactttatgataaaaaccctcaacaaattaggcatcataggaacatacctcaaaatagtaagagcttgtataacattccacaaccaacatcatagtgaaagggcaaaagatggaagaattttatgtaagaattggaacaagtcaaagatacttgctctttccagtcatattcaacagagtactggaagtccttgccagatcgttcaggcaaaagatagaaaaaaaggtaccctgatagaaaaagtagaagtcaaaagatctctcttcactgatgacataattctatatctagaaaatcccaaatactccactaaaagacctctagaactgataaatgacttcagtagggttttaggatccaaagtaaatgcagaaaaatcagtagcatttctatacaccaataatgctcaaccttagagccaaatcgataacacaatttcatttacaatagccacacactcacccaaaataaaatacctaggaatacatataatcaaggtggtggaaaatctttacaagggaaactacaaacactgctgaaggaaatcatagatgatacaaacaaatggaaaaacatctcatactcattaattggaagaatcattatggttaaaatggccatactgcccaaagcaatctacagattcaaggctatttccatcaaactaccaatatcatttttcacagaattggaaaaaaattttctaaaattcatatggaaccaaaaaagagcccaaatagccaaagcaattctaagaaagaaaaacaaagatggaggcatcacactacctgacttcaaaaaatagtttatggttacagtaacccaaacagcatggtattggtacaaaaacagacacatagaccaatgaacataataagaacccataagtgaagccacacacctacaagcatctgatcttcaatgattttgacaataacaggcaataggaaaagaactctctttgaataagtagtgctggaaaaactgtctagccatatgcaaagaataaagcttgactcccgtatttcacaatatataaaaattaatacaagataaattagagacttaactataaaaccaaaaactataaaatcctagaaaagaatttagaaaaaaccattctgggcactggtcttggcattcatgactaacaccccagaagcaattgcaacaaaaacaaaaatagacaagtgggacctaattaaactaaagaacttctgcacatcaaaagaaactatcaacagagtaaaaaaacaacctacagaatgggagaaaatatttgtaaactatgcatccagcaatggtcttatataaaaaacctataaggaacttaaataaataagcaaaaaacaaacagtctcattaaaaaataaacaaaagagatgaacagacacatctcgaaagaagacatacatgtggccaggaaatatataaaataattctcaacagctctagtcatcagaggaagacaatcaaaaccacaatgtgatacctaccatctcacagcagtctgagtggctactattaaaaagtcaaaaaatagcacatgttggtcaagctgtggagacaaggaattgctcatacactcttggtggaaatgtaaattaattcagccactgtggaaagcagtttggagttttctcactgtggaaagcagtttggagttttctcaaagaacttaaaacagaacttaaaaccattcaacctagcaatcccattactgggtatatgctcaaaggaaaataaatgttctaccagaaaaacacacgtctcagatgttcattgtaacactattcacaatagcaaagacatacaattaacctaggttcccatcaccattgggccggataaatgtggtacatatatatcatggaatactgcactgccatataaaagaatgatattattttttgcagcaacatggatgcagctggagaccatcatcctgagcaaattaatgcagggacagaaaaccatacactgcatgttctcacttataaatgggaactaagcattgagtacagatgaacataaagatgggaacaacagattcttggggctatttgaggggagggtggggggagggtgagtgttgaaaagctatctatcagtcgccatgctcactgcctgcgtgatgggatcactcatacagcaaacctcagtgacatgcaatttgcccatgtaacaaacctgaacatgtactccctaaaactaaaatgagttgaaaaaaaatttaagatagttctgagaaattcccagcaaacctttggcttgcttgttgggtttgtgagtctacacccactttcttttttacctcttttacttatttcccctttcttctccagaatggtttagatgaacatattctgtcatattctatttgctttttcttcagtattatacaacttttacacacattagactgcataccaaagatatgtaaatatagattcttcaactatacacttgttccatcatgtcccaaataaacccatttctaaaagcattaacaaactggaatttatctggaagagctaatacagatggttctctatttttcaagtacagtgaattttctctggcagtgaggaatgggaacatccaacatctgagctcatggtggctcaggccacatggaagctgctgccatgttgccttgtcatctgcagcttggcatcacttaatgggttcttcatttctctctcattttgtgggcacacttcagcagtagctcaagacactcaacagtttgtattctacattcatttataattgatctttgtaaaacaaatataagaaatttaagaccagctaattggctggtcttaaaatggggagattattctggatgattctgctgggcccaatataatcagaaggatccttaaaagtgaaagagggaagcaaaagaaaaatcagagttatgcaaagtgaataggatttgacctgctgttgctggctttaaaaatggaggaaggcaccatgatcaaaggaatacagcagcctctagatgcagaaaaagagaaggaatcacattctcttctaggacttccaggaagaatgcagtcctgccaacagtttctttttagcctagtgatatccaagccagacttctgacctgcagaactagaagataataaacatgtgttattccaagccactaaatttgtggtgatttttcaccactgcaatgaaaaactaaaatagcatcatatgattagtgtcaatgagaggttaaaaccagccaaaagatggagagacaatgtatgagtacttttttgaacttaaaagcactattgaaatagaagtccattctttactgtaaaaaagtaaaaacaacaaaaaggataataatacttagtacttatctcataaagttgtaataaacattaagtattcccctttctcttgaatataaaacaaatatataataggtcaggtgtgtgtatgtttatatatataaatatataatatataaaaatatgtttataaatatataaaaatatatgtttataaatatataaaaatatatgtttataaatatataaaaatatatgtctataaatatataaaaatatatgtctataaatatataaaaatatatgtttataaatatataaaaatatatataaatacatataaaatatataatatttatgaatatataaatatataaataaacaagtatatacagatatataattcagtattcaattaggaaagcagaaaaattccacataaatataatattgaacactaattacacaggtaagggaagaactgggaagccaaacaggaaatgctgagacactctagagattaacaagagcgggaagtcaccagtacccccagggctagaagggcaacagaaggaagtggcattcccaaaccccagattctggtcatcccacggaggccataccctccatgggtgctggtgtgtggtgcagactgtgtaccaagcaagagctggagtttgaaaggagatgctgctgtccaagagaaagagaaggagaattgtcctgtcttcatctttccttccatcatctaatctcacatcagtgccacccgttggttgaatccagcaagaaaccagctgaagtaagtgcctgggaagtgtagccctcctgtcaagaaaatgtggcacatatacaccatggaatactatgcagccataaaaaatgatgagttcatgtcctttgtagggacatggatgaaattggaaagcatcattctcagtaaactatcacaagaacaaaaaaccaaacaccgcatattctcactcataggtgggaattgaacaatgagatcacatggacacaggaaggggaatatcacactctggggactgttgtggggtggggggacgggggagggatagcatcgggagatatacctaatgctagatgacgagttagtgggtgcagcgcacgagcatggcacatgtatacatatgtaactaacctgcacaatgtgcacatgtaccctaaaacttaaagtataattaaaaaaaaaaaaagaaaagaaaattgcaccaggaacaaaaaaaaaataagaaaaaaataaaaaaataaaaaataaaaaggcacatcagtttagaaaaaaaaaaaaagagggaatagggagttactgtttaacatgtacagagttttagtacaggatgatgaaaaaccctggagatgtatagtggcgatgatcaatgtgaatgtactcaatgcctctgaactgtacacttaaccatgcttaaaatggtactttttatgttatgtatattttaccacaataaaaatcaattaaaaaaaaaaccaaagggaagcaggggaaaggagagaaataagagagaaagaaaaaaagtgggtacaaaaatagtccttacatattgccttgttgtgaggattaaactatctgaattgtgtgaagcactaatatggcactcattagcgtgtattcagttgatgtttgctattgttattattgccttagctctaattacacaattaaagtaatgaaagtgatgcttaaaacttctcacataacctaggattgtaaaccattctaaatgctttccaatctattatagtttcctctagagggacattatcatgtgctgagctttattaggcaacaaaacattgctgaagggtacaccagagacaacttgatgaacgagatacaaagctagcgtaatgtgacaagtgcaaacaaatcttcccctcactcagctctatcatcttgctttgatcacatgttggtgaactctacaaataacttttaaattatcttttgagaaaatttaataatcgtgcttgggctgtctcctgagtttatttaagaaacttatctactatattgtcagcatggaaaacttaatatcttgccaactaaaatatacttgtaagtcattggtaaagtgtttaatttctgtcttgttgcatgtctgtgtttggtgtttgcagttaaaaagactcctacatagtctttaatttcatttcacttttcatccttttaagacatctacatcatgtctgagattctagcttattttaggtcatggaaaaattcctgtatgtgtatactgaacagactctcatgtttatccttctgtatttttgctgagctctagaaccatatttagttactcagtggggatttctactcagttttccaacagtaaatcatgcttacaaggcaacacatcattgttaagcacaaatcttctgcttttgaccatggcacatgtttgcctatgtaacaaacctgcacattctgcacatgtatcctggaacgtaaagtaaaaagaaaaatcttctgcttttgctcctgtaatttatatcttggtgaatgaaatcatcttccccctcctaaaatcagaaagagtcataataatgtcccccactcacttcctctttttctttctcctgaccccatccaaacagtcagtacattgtgaatccaccttgttcaaaagtctccaatctacttcatcttctcatttccacaaccactgtcttagttcactctcatgccacccgttacccagcagactccctaagatattgatcttatctccttgcttccaacatgacccttttcccatctagtctctagtgtacaattagaatattttcacacacacacaattacaacttttccaaatttagaagtatttgcttgtttcctatggtttctagttaaatttcaaaatattaggctaatatgcaatgctgatgaaatttgtcattgatgaactctatagcattatatcctgtatgtacgatttatagcaacaatatgaaattacttttattactctaagtagcatcccttcctcaagaatgtcttttctgcaagagctatcttacttagatgctttttttccttgaatattcctatcactgcaatcatcagacagtgctttcttagtttttacatgtgtgcatcttacttatttgactataagctatttagaggcaaataccatggttctagatgtttctattgcaagtacctcaaactatggtatccaatatggtagtcactagtcacatgtctgttgagaacttgaaatgtggctggcccaagttgaaaggtgatataagggcaaactacccaccagattttgaagacccaatatgcaaaattaaaaaatatattatttttatatttgattgcatgttaaaataatatttggggcatattagattaatgttattgctaaaattaatttcatctgttcttacttttttatggctcctacaaaatttaaatgacatacgtggctgacatttgtgattctcattaaatgtctatgagatggcactgtcacagaatagaacaggatcaagaagcattcacaagtgaaaacaggcctttgaaggaacactctggaaaaagtctaggcatttaaacaagatcgagagtgcaaactaaagtagaaaagaaaaagaaaaatagaccacatactcagctttgcagttgagattgagtcgtctaggaaggagcagctagaagtccacataagatttttttttctttttttttttgagacagagtttcgctcttgttgcccaggctggagtgcaatggcacaatctcggctcactgcaacctcagcctcccgggttgaagcgattcttccacctcagccacccaagtagctgggactacaggtgcccaccaacacgcccagctaatttttgtatttttagtagggccagggtttcaccatgttggccaggttggtcttgaactcctgacctcgggtgatctgcctgcctcagcctcccgaagtgctggcattacaggcgtgagccaccgcgcccacccacataagttgttttaagcttatttgtcctggagatgaatctgaattttgattctgaatcttgtgtgtatgggaaagatttttgaaacaggtgaatatgagctacttaaacatggaagagtgatacataaattgttctggagccacttaaagactcttaaaaaatagctgccaaataaattttttgaaaaacaatacaaccacaatgacaaatagaagggggtagcagataatagtaataacattttggaaaaagaaatcagagagataagtagttaataagcaatgtgtaagtagaagaatatctcaaagatattaatattccaagagggaaaacaaaacatgaaccaagaaatgtgtcttatgaagcacttcataaaatatgaagaaactcttggaatttcttgaacctgagaggcggaggttgcagtgagctgggattgtgccattgcactccagcctgggcaacagagcaagactccatctaaaaaaaataaataaatcaataaataaaagctcttgatgttaaaaatatgctgatataaatgaaaaactgagtggaagaaatggaagataacattgaagatagctagaaatcagagcaaacagagacagaaaacagaaaagaagataagaaaattagatgatttgcttaggagagcctaataataggagtaacagaatgaaaaagttgagaaaacagagataagaaaattatcatagaaatatatttttaaaatatattcattactaaagaacgtgagttttaagccaggggtggtggcacactcctataattccagcattttgggaagctgaggtgggggaattgctcgaggccaggagtttgagaccagcctgggcaacaatgtgacactccatttctacaaaatattaaaaaaaattaattgggctcagtgggacacacctgtagtctcagctactcaggaggctgaggagggaggatctcctgagtccagcagtttgaggtttcagtgagctgtgattgtgccactgcactctagcctgggtaacagaaagaaatcctgtctctaaaaataaaaaataaaatttttttctaattaatagggtcccaaatgtcttacacaataaatgcaaatagacccagaccaagaaacataattaaaattttagaatagtggaggcaaagagaagcctctagaagcttctagagagagttttatgcaaagagtaaaatatcagaaggccatcacacttctattaatagaacactggaaccctgaagacacaggcgacatattttcaccttcttagcacaaataatctacaacaaaactgttaagccaaatatctagtgtgggtttatggataagataatttaagaactaaaaaaaaaaatattgtctatgatccttttacctttctcaggaggttgtgttctgctaaagtcaagaagaaaaccaagaaacaggaaaccatgagatgtagcagaagagggaggcaaagtaaaatcctaggaagatgcaacaaaagtatcaagaccacagcaagcctagatcaaccagtccaagtctgaaggcctgaggaccaggagcactgatgatgtaagtcccagtccaagagcagaagcctgatgtcccagttcacatagtccacagagagcaaattctccctcctctgcctttttgttttattccagccactcaacagattagatgatgcccatccacactgtggagggcaatctgccttactcagtctgctaattcaagtcctaatcttacctggaaacatccttgcagacacactcagaaataatgttttaacatctgggcaccccatgacccatttaagttgatgcatatttttaaccatcacagattcaattacaaagtaatccattaaaagagtttaatatgtatgcttctggagaggacaaaaataatgaaaatattaagcatctactctttctcataacctgtcttacagaactctttgagttttaaaaaatgacttaacatgtatgagtaaatatgactaattaacaaaatgtgtatgtatgcaagtccagaagcactgcacagttagagcatatagatagttaaatgaggacaaaaaaatctgtaaacaaagtccagtttataatacataccagttcatgaaaaatcaagcagtctcaacatggtgctagaaagctcattttctgattttaggaagaaccatggttccacactcaaacttcagctggttgggtttaaaacatctttttcagttttgtttacacattatcaataagtaaatgtggcttacatgaaactttacagagtttataatttgtacaaattttgatacacagtatatgtgaaatatgtcttcacaatagcaaggtagacctatatataagcctgctgtaaggcacctattatcaaataatagtaggaaacattactgaagattttggaggtgtgtggcattgccatcaaccactgatttatgtattttctcattcagtaatcccatgaaatagagtgagctgtgtgtatcattgataggaagttaaagctcaagaaataaaataatttgcccaaagtcctgcacctgcttttgatccctgagctgtaaagactcttctaaatgggtggtgattgtttcatagtaatcattttaagaggtgttacatttacttcgctgatactgctactattgttaaatcataaaaaagtgtaacaatttacattcggaaacgttgttcccatcattcttgaatattttcagctggcagatatttcggtctttgagaatggatttgatttttctttaatagacaaaattcaattggagtgaagcctgataaactaaattaataattaacttgagaaatgttttcttttttggtcaaaagctgcatttgtgaataaaaggtatgttttgtaattagtaactttgctaggaaggcatttctcaaagaactccaaatatgtggtatgtagatgatgtcatgaaagtgtgtacagctttgcatagcaatattctgaatgacatttgaatgcatttctctccctctctctctttctctctctctctaatttatctatctattcattcatccctctgtacttgttaaaaattccatgcatttaggagtacatgtgccatcatactcatcaagaacttgcattagggaaatttatgtatatttctggaggacacgtcttttcttcccagtctcggtcatacttgctttgccttgcattccctagcactctgtgtttgtgttgtaccatgtccataaatgcttactgctgtgaagggatccactatgaaaggcataaaaacattctacatttttgcactaaaaatactaaaaaatatttggaaatacttggaaatggattgttgttgtccctcctttttcgtaaacatacctaaaaagagtgaggttgcatcccagagggtatttctcagaagctgggtcttctgcttgcttatagggtccaaagttctccttgaaagagaaatgactgctacactgtcactttctaaagaagagtcttagttttaaaatttcttggtcacttttgttcagagtttggtttactgagctgtagagtacctgtagagcatacattttgttttagcctattagatggttaatattgagtgtcaacttgattggactgaaggatacacagtattgatcctgggtgtgtctggagggtgttgccaaaatacattaacatttgagtcagtgggctggggaaagccgtttcacccttaatctggtgggaacaagataatcagctgccaaggaatataaagcaggcagaaaaaggtgaaaaggggagactggcctagcctcccagcctacatctttctccggtgctggatgcttcctgccttccaacatcacactccaagttcttcagttctgggacttggactggctctccttgctcctcagcttgcagacagcctattgtgggacctgtgattgtgtaagttaattcttaataaactcccctttatatgtgtatctatcctattagttttgtccctctagagaaccctaatacaggctgttaattaattttattgaatttctccataaaacaatgattttaaagaacaaacctgaatgaatattaaatcctaaagtcctcattatttgaatacaataaattattttactttgttggttaaatgagatctagctaaagcttaatcacactatttaaggaaagaagagacgtgcgaccaagaagtcagaaatacttcctggaaattgcttcttttgattttgccatttcatcatgcagcatggtgacaggttcctgggcctattgctgtgacagcatgatcacgaggcagcatgtgcacttggctcactgtgacaatcatcctaagccaattatccgcacatgatgaaatgctcatcctcaacgctatttcaatagtgattcagaacctatctactcatttcctagtgctctctttctatcctggttttcctttcgtcagaagtgatgtaaataaaatactttgaggtttctggaaaggagaaaggagtttatgttaatatccttctaattttcagcccttagtgcagaattccaaattatggctgaaactttgggaggtcagctagatgcctgctttgtgtttttattactcccttccggacgtacgtgcttatttcagagatattttgtaatctctgctcttactcagaaactaagtggcaaggaagcaaccttaaccatagaaccctttaatagcaagagaaaagattttgctagaaagactaatcatttaataaaggtaattatctctggtatctattaacttcagtagtctgaattctagtttatacctcagaattaaagtttacacctcatgattagactctgcatgattcctcattcactgagaatggctctccagagaacattgcctggctagaataatgaagctttctatcctcaaataccagagataaaaaagcacaaggaaaaagacagatatatctcatacacaggtgaactattctatgtaaaagataagttgaaattttctacccagctttcatttccaagtcctggtagagacagaagtatttgacctggctgaaaagcaagctgacttaaggggtatgattatgtcgtactttgaacaatgtggcttaaaccattattggaagttggtacaaataaacctcataatttgagaaagattggaaaatataaggccttcgacaaaatgctcacgcagagaacttttccatcttgtacttctccttaactgcttctactcttgccttgtccctgtcttctatcacaaagggatcatgatctgtaattgatatgctaacttttggatggcagcaaaggcttaatgaattattccttctggacagtttttgaaggtcaacgttcttcaggatcttaagctaaaagatgagtcaggggacatgtaagcaccgctgagaatattcttggtcagaatttttagagaaaatatgtcccatgtcagaaacacaaggacacacattacatgtctcccctttgctttcagaggaaggaatatttcctctgcttctctttgttttcagacacaacctgcactttatagccattctcttaggaacaaagaatatataaaggaaataaagcacacggtctctttgctttcggaaagctatttgtgaaagttatttgcatatatttttctcttcaggagagtttagaaatcactggagaattgctttgtgctttaatggacagtggagggatttagtaatcagagagatggggcactgaatcccagcccaacagctaactggctttgtgattggtctcagtttgaatgtcctcatccataataaaaggatgatagagatcctaacaaggtccttctgagcacctgccagcagacagcctttggactggaacggaaacatcaattcttccctgggtctaaagtctgcaggcctaacacgtagatttttagacttgctaatcccctccataattgcataaggccattcctaaaataaatctttctcgctctctctccctctctctctttctctgtctctccacacacacacaaacacacacacacacatgcatgcatggacacacacactcacatcctattggtctgtttcttcagagacccctaagtaacacagattttggaagcaagaccactgatatttgatagatcttaattaaactctcattttgtcacatttgtaatgtctgagaaggatgatggctatcttttttcctttattcatttttacatcctcagtttatgtcagaaaggtgacaaaactggatgaacacctgaactcaaataagtcttaggagtcaataatgaagtataagaataatttattgggcgcctaccagatacctgacttcctacttgttgacccagaaattatattgatttatacgcatatcaatatatatgaatcaatatcattcaaaatgaatgattcaattgtccattcactcactgataagctcaacaaacattaaatgagtcacaattatgtatcagtgtgttacttgcagaggatgcatgaataattctctagtggaaagatgcatacataaatcattacgataatcctcgcaattaacatttgatgagttcttactaagtgctgtgctctttgctaatccttttacatgaattatgttatttacacctcagaatgactttacgagacaggtgctattattatatcaattttacaaatgagtaaataggacacagatgaaggaacttgtttaaggtcaagtagctggttagtatttacagcagaggctctgaagcctcttagacactttgatctcagctgggggataaaggacatatgagcagtttgaagcctatgagtatgaatcaagtttcacagatgagatcatctttgagcttggagggtgggagaaaataaagaaggacagattcataggacccgggccagaaatggctttattttttacaccatcatgtggaaggaaacgatagttaaacttttcttcttttttaatcttttttgagacagagtctcgctctgtctcccaggctggagtgcagtggtgcgatctctgctcactgcaacccctgcctcccaggttcaagcaattctcctgcctcagcctcctgagtagctgggactacaggtgcatgccaccacgcctggctaattttttgtatttttagtagagacaggatttcaccatgttagccaggatggtcttgatctcctgatcttgtgatccacccacctcggcctcccaaagtgctgggattacaggggtgagccactgcacccggctgacatttaaacttttttaaaaggcaaattatataatctgatttggattttagaaaaataactcgtagctggagagaaggaagattggaagagaattagatcagagacagggagataggtgatagaatgcacagttatctgggtaaaattgatgagagactgaggtaaagtggcaggctgggtggagggatgagatatgtcacaaggagggctgagtggctcggttaatgtattggtttggaggcttgcaggagagtgagaaatcttggatgacaatcaccatccaccaccaacatatttctattccggttgactagggtggcgatgatgccattctctgtaatagtgaccagggacagtgcataatctgctagtgggcagggggctgggaggatggcttctgtcccatgttaagtttaagcagcccatgcatactgaggaggagagtccattagtctgaatatagagatctagacctcagaaggaaggctggggctgagatatcaatgtagggattatcagcattcaggaggtggctgaggcatttagaaggtatgaggccagggagagtgtggacagagaggaaagaagatgctcaaggtcagaaccacggtgaactttaatagttaaatccagaaaggtagaggaggccacaaaggagacaaataagaagtgagggaggccttgtaacttattttttaaaaagtttttttgaatggctatgcaaactaaaatgcagttacagttagcctttcatatccatgggtctgtggattcagctaacactggatggaaaatatttggaaaagagaaaattccaaaaaccaaaacttggatttgccttgtatcaaatactatatatatttatatttatatagtatatatatttatatttatatattatatatatttatatttatatattttatatatatatatatatatatattttttttttttttttttttttctgagatggtgtctcactctgtcacccaggctggagtacagtggtgtgatctcagctcaccgcaacctccgcctcctggaatcaagcgattttcccacctcagcctcccgagtagctgggattacaggcacatgccaccacgcctggctaatttttgtatttttagtagagacagggtttcgccatgttgggcaggctggtctcgaactcctgacttcaggagatccaattggcctacctcggcttctcaaagtgctgaaattacagatgtgagccaccatgcccagcctcaaatactgctttgaatccatatgaagaaagtaatatgtaggcattgtgttaggtactataagtaatctagagatgatttaaagtatacaggagggtgtgtagaggttacatgcaaatcctataccattttatataaggtacttgatcatctgtggatttcagtatactcagtgggtcctggaaccagtccctcatggatatagagtggtaacaaaacagaaagtaggttcagagaaagatgtcaacaatttctgaaatatggaagtagatgaaattcagaggaaaagtgaatggaataacatccctaccatgagagtgatactgaactttttcttctgtattcgaactctatttacatatttaaaagggtaatatatagctttggccactttagttttttgcttttttctttctcatgattcttaaccatgtgaatgatgatgtatatgactgcattttttgttatttataatgatttattcataaaacatcttatagtgcatggccagttgtctcccaaatttaattttttaaatttctacacgtacaactgtgcttttttgttacagtggagaggtctttgagctgacatcttttcatcaaaaggttatagattcttctcacacttcgcagtttcaattgacaaaagaattgcttttttttttcatagcattttcccaactgctcaggatattggaatggctacatgtataaaacaaatgactcttctgacattggacattgaatggctccactttctcacacattcttggactatgcagtgtttttcctgtgcagggcctgtgacctacagatggccatggcagattcaataaaatgaaaaaagctaaacaaaacacaaagatgctcattattacattattctacgttttcctttttcttctcatgggattgtttgacaatggctaaatttagtggttggcattcagcataaatgattggtggtacaggatctcgctatacagaactctatttcagcagaattgatttctaaaatgctgttcacttatacgcaggggaatcataaattttagcacagtgttgatctatatatacttcccagtggaaaaggtctcctttggcagtagaaagacttgaagtaaaaattacttagaaaagttctggatttgagaatggagatatgaaataaaataatatttttattaaattttttaaaagtttattatttattttttagagacatcatcttgctctgttgcctaagctcgagtatagtggtacaatcatagttcactgtaaccccctcctgggctcacatgatcctcctgcttcagccaccagcacatgctaccatgccccgccaaaataatattttaatcaaatagatggtaaattataatcttaggaagtgtgataattctagtactcaaatatctttcactattaatattatttgaataatcctaggttagatcattataacatatacttggaaagcaaataataatgctgattcgttgtaaaataaatgcaaatacattttgtgttaaagaaagctgatatcttcaaaaaagccagtcctgatattctttgattttcttttggcttctgttttgagaaatggtaaaatattagagcattaatgtcagacttgcctgacacaatattttcttcttgtttcgaatggtcaactactaacatcatggtgttcccttggttttgagatgcttttcacagctaataggtgtgatgagaaagaatcataataatactccgtgatctggagaagcattaagagggcagcggggcgggggggtaatgtagtggataaggtcaagggcttcagtattaaatagacagggcttcaggtcctaagttttactgtgtgatcctgggcaggctttgttttttgtttttttaaaaatttcaaagccttgatttcttcatctgcaaaatgctgatgtagtatttcaaacactaaggtctaccaccttagaaaaatccgctgtaagtggcaatttgggtcaaaacaaacatgtcacgttaatggaatcgtgtttatcaagctgattgggagaaggcattttggagtccctagggcaggactgtggtagggatgtagggatgcacatggcctattgtgggagatactggggtttggtatgcagagtggggtagaatttgtccaagacaacccacagttgtttggtggtgggtacagagttgacagcagagccctggttgaaggaaagccagctgttaagtaagaagcccttgtcttttccaatggccacataagtacaggaatgacagggtaagtaaagatgttagtacctgggagaatggtaaacaggatatggaatgtggataaatggtttggaactaacagggtgatgaaagcaactacctcatacataacatgaaagaagcatgtgaggtgtctacagctgtgagcttggccaatagaacttataaactatacacttgtgtattattagcattatgatttttgagcaatgggttggaaaaatgtagcctcagggccgacctcctgagattatgacttgtgtaaaagcacaagactttgtgtttagaaggaactggtgcttggtttgaggcttctttgacatttttaatattttttgaacaaggagcttgcacgcttattttgcattgagccctagacattttgtaggcagtcctgtgtagcatgtctatcacagacatgtggttttgactcagtcaccccacctccctgcctgtgggacatttgacgatgtctgagttgtttttgattgtcacagctggtgtatgctcctggcatctatttcatagagctcagagatgctataattggactgaacatggtgggtcacacctgtaatcccagcattttgggaggccaaggtgggtagatcacttgaagtcaggagtccgagaccagcctggtcaacatggtgaaaccctgtctctactaaaaatacaaaaattagccaggtgtagaggcacatgcctgtaatcctagctactctggaacctcaggcaggagaatagcttgaacccaggaggtggaggctgtagtgagccaagatcatgacactgcactctagcctgggcaacagagtgagacttcatctcaaaaaaaaaaaaaaaatgctgtaaacatcctataatgcacaagtgacagccccgtaataattacttgaatttttttttttttttctttttttgagatggagtctcgctctttcgcccaggctggagtgcagtgacgcgatctcggttcactgcaagctccgccccccgggttcacgccattctcctgtctcagcctcccgagtagctgggactacaggcgccctccactacacccaactaattttttgtatttttagtagagacggggtttcaccgtgttagccaggatggtcctgatctcgacctcgtgatccacctgcctcggcctcccaaagtgctgggattacaggcatgagccactgcgcccagccaagaattacttgattttaactatcaatagtgccaaggtggagaaacccttatttagaatattttaataaaaacaaatccgtctgtggatccttggacaacattattgttagcaaatctgggaaggtgcaaggttgactggtaaactctggaggaattaagctccatctagttctgtgttgcacatttggcatggcattcctgctaatgggaggatgtatttttataactgagtcaaggtatcataaagttgaacctaatggatgccagaggagactcatttgacttggcagctataaatagctcaccagcagcacctgtgtaactcttataagccttatttttaaaatctggcaatgaaaagatggattctggctgaatggtcacaaaagcttcttttctaagtgtcaaatcacactccttgctgtagttcacttctgggtcagtttcctattagctcagaaaaaaaaaaaaaccatctcattcccttacatgcataggttagaacaatgcactgtttaaggcagggttttcctaaagagttttggaataaatgctttaccatataaacagggccctatcagctatttactctgttgtcgtgttcatttgtttttgtgggttataaggattgagctaaacagccttgtgccctagagattattttacatggaccaacattgcgggtttccttcctatgtaggcagggctgcttcagtcacaggaaaactattttatggccccagatctatcacctgtatctaagggtcatgtcagaaatgtgggcaagtatgaccaaggatgtaaaaggaaaacaggtgatggcaaatggacagactcattaacataactggaaaaataactcaaaatgcataacgtcattactgtgggacaatcccagtccatttgtgcaagaaagccagcagggttgttttaaatttacattttagaccatggagttttcttttatgtttcttcccacgtggcatcaacactccttatcgcttgtctggaaagacttgaggattaactgctaataaattacattatctccaaagtaaatttaagtgtagtcatggattctaagtctcgtttctctgctttcaaattgtttacatattggttgtctgaactttgtaatcccattcgaattttaaaaagtgattttcatgatttattacaatgactgcattttaaatacatcctagaactcaagaccgcagagaaagttatacaacctggagtttctcaggctcttcaacatctgaaatgtttaacatgagagagattgtacacatcaggatctcttatccctgataaaatcttagaatgtctactctttacatatagcacaaactaaaaaaaagactaaatcaatcccattaaagagtgattttaataaataggttggtgcaaaagtggttgcgatttttgccattactttaaaaaacaaaacaaacaaacaaacaaacaaaaaaaaaatgacaaaaaccgcaattacttttgcaccaacctaatattactgaggtttaattttttctatgtggacaagggaaagtttgtttctggagaatttttacatgtttgcaatcttttagtagtattttttaccctaaaggtatgtaaacaataactttatagttgattatgcttttcagagttaagtataactcaatcattctgatctagggagactattcttaagaattgttttcggctgggcgtggtggctcaggcctgtaatcccagcactttgggaggctgaagtgggcggatcacgaggtcaggagctcaggaccatcctggccaacatggtgaaaccccgtctctactaaaaatacaaaaattagctgggcgtagtggagggtgcctgtagttccagctactcgggaggctgaggcaagagaattgcttgaacccaggaggtagaggatgcagtgagccgagattgcaccactgcactccagccccggtgacagtgcgagactctgtctcaaaaaaaaaaattgttttcacaatgtatcaaaacataattttaaaataaaactggaggaataatttgcataattttttccatagaagaaaaggaataagaaaaggtatctattttctaagatgtgctatagattgaattgtgatccccccgggttcatatgttgaagtcctaaactccagtacctcagaatgtgactgcatttggatataaggtctttacagaagggattgagtaaaaatgattgttaagttgggcctgaagcctagagtgcatttataagaagagaagattaggacacagacacacacagagggaatggcatgtgaggagacacaggagaagaaggccatctgcaaaataagaagagaggcttgggacagatccttctctcttggcttttggaagaaaccaaccctgttgccacctcaatcttggacttctagccactagaaatgtgagaaaataagtatgtgttgctccagctcccattctgtggaattttgttatcgcaaccctaggaaactaatacatcatacaactattttttggcatggaacatggattttgtttacctttgattttttagcattgatagctgtatcttgaaaataacagatgttcaaaaaatgtttctgtttttgcattgagctatctggattgagaggaggatttatttatcctttgtagcacagaccccctgaagtccatcaaaagttcatatgtcaacttctagagcaatgtaattcagaactacatgtcccacccagcctccttgcatctaagtgggccacttcatcatgtctccttatcagagaatgacagggaatgattgccaagtggcttttttttggccaagcatggaaggagcacatgcaccttcttcattctcttttcctttctgcctcctggatgtgaatgcccaaggcaatccggtactgaagattctgaagccgcctgaatccctaagagcatgaacagaacagaagcacttcctcaccccatgtaaccttcttgatgaggcatctctaagggactgttacttaaatgggaaataacctctcctgcgtttaacaactgagatgctatggctcatttgtagagcagataacattaccctaagctgtatagatgtggttatatgcagcatgtgctactaaaataaaaacctaaaatatatggcagtggcttggcagtcaggcagcaaccaaagaggaaacacgctgcacaaagaaccacttttcttttttttttttttgagatggagtctccccttgttgcccaggctggagtgcagtggggaggtcttggctcattgcaacctccgcctccagggttcaagcgattctcctgactcagcccccgagcagttgggactacaggcgcccgccacaacacctggctgatttttgtatttttagtagacatgaggctctaccatgttggccaggctggtcttaaactcctgaccttaggtgatccacccgccttggccttccaaagtgctgggattacaggcgtaagccaccacatctggccagaaccacattttttatggcaaaacatttggtaaaattttgcttgtaatacgttgaaagactgactacctgtttactaagcctgtagggggaaaagtttggaaaaagtcagatattaatagcttatgttggttgtcatttgctgaggtgagcaagttattacaaggaaagagatgagctcaggcaataattggtgtgattgagagcttacagagatgagaataaaacagtgcaggaattgaggcctcttggggttggaaaagcttccattgccaaaatgagaagacctaaggcctaaaaagctttcagtctcaaaggcccattaagactcagcactgtgtcaaaggccgcataaaatgtggattttctcatccatctgattgttatagtagcagtgtagtcaacatgatcttgaaatggagagctatcgcagtgaaaccaaggagtagacctggtgtgaggacagtatctacaaagaacttggggtattattcttgatacatggatgcaaagaattcacggtagggtagccagatttagcaaatacaaatataggacacttggttaaatgtggatttcaggtaaacaacaaataatgttttagtataggtatgtcccttttaatctattctatagtaaatatagtatacaatatgtggggcaaactaacgctaaaacattatttgtggtttatctgaaattcaaattaaactgtgggcactctgttttatctggcatccacaattcatgggccatgaagattttgaagggagctatattacaaagaagccataagcccagtactctgagtattaaaatctttaaataacacttgggtccactcccgaaatttcagaagaaacaagtgagcatggaaatctgaggagcctgctatgagggcatgacttcctaatgtctacttcagatgtggcatggagaataacatttaaggaagaaatttccagaaggcagagttacgggctatggagaacaatgaacaaggatatttctcctagaagtagaattaggatctactcaaatactcccagtgctaggacatttgcaccttcttgtgtttttccatgatttctgtgtatgttgctactgaatctcctattttccttgtcatggatgatgatttttctcgcaccgatccttgctctgttgttttatattgactgtgagcaaatgcataaaagttgatgataacataatttattattttctggtttatgaagaaccctatctggattggaggacagagatcctagactttgagctggatgctgtaatgggataacacttaatgtagttccctagagagaagtataagagttctgtatgtgggagggagtccacacatagacactgagaggctacaagggctgaatattccagcaatctgcctctcaagtcagtttttttccctttgcataggaaagggtcagcaaatttttcggtcaagttccaaaaagtaaatatttgacactttgcaggccaagaggtaaaataggggacattatgtaggtactttaataacaaccatttaaaactgtaaaacacattcttggctggcaggccatataaaaataggcaggaggctggatctgacccaagcctgtagtttttgattcttggtactgagctgttggtaggaagcagcttcctagctagggactttttttttgcccaggcttctttgcatttttttgggatcatgtgactagttcttaccaatgaaacgtgagcagagtaagtcacctttaacatgaaagtgtgccattttcacattttctttcctgtcttatcacctgactttaatgcatagtcagcctagaaagtcaacaattaaaaatgcaaaatagagaccgagtgcggtggctcacacctgtaatcccagcaatttgggaggccagggcgggcggatcatgaggtcacgagatcgagaccatcctggctaacacggtgaaaccccgtctctactaaaaatacaaataaaattagccgggtgtggtggcgggcgcctgtaatcccagctactcgggaggctgaggcaggagaatggcgtgaacctgggaggcggagcttgcggtgagccgagatcgcgccactgcactccagcctgggggacagggcgagactcggtctcaaaaaaaaaaaaaatgcaaaatagaaatcagctggctccctaaggagaggctaaagcagatgtctacaactccaaggacacatgcattggtctattatgtgaaaaagtaatccatttctattacattaagccaatggattcttgagtttgatttattactgcagctagtgttataaagcactgctcatttcattgatatgttttaagattgctaaagcatatttaaatgcagcgcccctccagaagcctagcattcttgtctattaaacacttgtctttcttttgttaattttgacagatcaaatgttcattctttttcactaatatattggatccacttttattacagtaagtccctattacattttagttggcttttactcatttagttttccaaatctacacacaaattataaagttatatctttagaaatattattaagttaatgcaaaaaatgcctactattaaaggagatgttcatgcactgtgcaaacttttgaagctttatcaagttatctgtttatatttgttatatatgttcattttgtcacccaaccagtgagaaattggctgctttatgatatcatcatatgatctgaatagatagtatgaagatatgtgaacagcaagattattttcttttaactttttaattcacatacttgtgtagtcattaattgtgggaaggggaggactcttactgaaacatatattatttcctacctctcttttcctctactaatgagagataaaatctgaggtcctttaatcaaatattttcataaaaaattatttaaatcaaaatattttaatattaaaatttttattcaagtatttattaaaatgactagaaattattgaatcttagaagaggtacagattagacgcagaagaaaaaagaatgaggaagcaaagaaaactgagatgctctcagagcaactcagtatatttgatgtcaccaaacaaaacagatcagataagtaaagatgtcttaaggctcattcggtgcacatggggaggaaagattcacaaaacggtctgtctttctcagcatgtcccctaaactagaagtagtttcctggtaccctctggccgctaaaattaactttccctttgcaaaatcagtttgccacgtatgaaattttaaaaggcaatgtaaagttgttgtggactttaaaaaatgtataacatatttgaatgatgacaccgtatagaataaattcaagtggatgtgatgtttctggtttgatgttagaaatattttatcgtctgtgaaagttataaaggattagctctagaaataagtatcattaatatgggtcaataagtcttccacaattataaaaatatttgttgatataatagatgtgacccagacttctatgaattacatatatcagataaataataaataatatgctcctcaaatggtaaacaaatgcaaacaaaattccagctgattgctacctcaccagctcctctatttgcctgtggctttagtttctcaggtttattggagcccagcttgctgggggacaccccagctcaggtgtcttctttctattgtctgctaattccaatagcatttgtccatgagccttcagacttctcaaattttgtcattgtcttatcctcttctattctttccatttttgtggatgtatgactttttttggggaaaaatgttttgttttcatatttgtcaaatcttaggagaatgtgaaacttgatattgatcaaatctatcatgcctgtttgtaagttcagtgttttctttgatagtagggtaaacacagcttgatattggtgaaaactgggttttaaatatgtgtgatagtttcctcagagggaaacatctacattttatcaaaacaataacagtcctcttaggaacaaacactctctgaccaccaaccatcagtgcctaaattactcatgtctttaaaatagcacaagaaatggtcaatagaatctaccttggtttgttataaatagctggaatcttatattaggaattaaatctcattctcctggagtcttaatcttgtactaatttactctaggctaggaacgcacttttgtttttctcctaagaggaaaaatataaaaatataattagtttgttcttggatatgttggatttaatggactcagagaacttattctccacagagccagataaacatatttggctttgtaggccttatgatctctgccacaatcactcacctttgtcactcaaaaagagtcataaacaataggcaaacaaacaggacagctgggtgaattgctttagcctaatgggtaagactccaggaagaccatggatgtattttaaatgaggtttttcagtagttcacataacaatgacaaaaaacgcaacaaattgttgttatcctgatcatcactgcaatctaccaagcaaacaccagttgactgaaaaataatttttagctaattagaaatttctttatacccaagagtttcccccagagctactaaaacacaggcagttatgtgaatcatgtgttataagagggggcttaaaggcatggttagacatggttagcgaaagtcaaaatgagagataatagtttatattgacgtttcctttgtttttgtttttatttcatcttttcaagtttgtgtagctctatgggatagtatatgatgatcatcttcaatctttagcatgtgtaagaaatatctacaggacttgttgggtgccactacaagaaactctgaattgataggtctggtttggtgcccgaaaatttgtattttgaagttttcaggtgcactctttcagtaaaatcacccaaggaaatctttgccctgtatgtacttgaccagattatatgctccatgttagattttagaatagtgatgttttgtattatatttgtagacttatgacctatgtttttcttctgctgctaacctaactgggaagaccaactatcattttaagatagagtcagagggccgcgcgtagtggctcacgcctgtaatcccagaactttgggaggccgaggcaagtggatcacctgaggtcgagagttcgagaatagcctgaccatgtggtgaaaccttgtctctactaaaaatacaaaaattagccgggcatggtggcatgcatctgtagtcccagctactcaggaagctgagacaggggaattgcttgaacctgggaggtggaggttgcagtgaaccaagatcacaccacggcactccagcctggccacagagcaacaaagcaagatctgtctcaaaaaaaaaaaaaaaagaatcagagaaaaaataaaaaagtgcatgctttgtaatacctgtagatttatggcaactggtagaatggaggatagaaaattgcataatattggattgtgcaattgcataattaatctcaggaaacagcagtaattcttgttttattacaaacatcatgtggttttaaaaattatcttcaatgtgattttatatattacatttttagaaaaatatttttggtctttttgtgagcataatagtatgcatgttagggaaataagctgaaaagagtgaaagtaagtattccacttgttcttttttatttttttccttaatgattctcttgaataagttaggcattcaaatcggtttcttggaagttcagagttctttcttgaaaagtttatctttcctctttgccttttctcttgctaactttgactaagatttaaaattgagcaaaaaaccactggattctttgtagcctgtttctgcgtacagggttcgtcactctcttatctctttagctttgctttgacattccccttgtgagcaaaatcattaaaaagcaagagaaccttttggactttcctttcggatggtttctgataactctgaccattttaatatatattttggctaacctgtagtaagtacatggtatttactattactactgttactactgatatcattggtctatatttatggaattcacctctttttcccttttggaatactggaatatatttgctttcctccaattttccagaaccttttcaatctccacattttcacaaatacctgaatcaaatcatgtactatttattctaagcatgcaacttaacacttgtttaaggcaacctaggtgtttgcgtatccattgctcatgaatcttgagtttaaatgatgttcgtttctattcctatctgcagatcattcttaccagatggttcacaagaaaaattactttatatccatcagtgttgcataactacacacaatgataaaaaatattctttgtgtgactctgctcaatgagaaatatttaccatattttgatgatcttagtatatgtagagtagtttgtattagcctttgctacccatattctacatatttccctttaaataattcctagaatttattttcttgttgtatttcaaattttagtaagtttggtaagttctttaaacgtattaactaatttaattctcacaaaaccctaaaatgtagataagaaactgtggataagattatgctccctacattttagatgaaaaaattgaggcaccaagaggtggagtaacttggcagtatcacccagtggctaaatttcagaaggaggtgggattcaaactcaggcagctggattgcaaaactgaaactcctaactgcccttttaccttgtttctataacttcattgtagagacaccatttaaaaaaactattatcccttaattggggattgacagtgtctgtaattacagttaggattatattattttaaatgtattctttggaccgtcttatctttcagaatttcatgctttgaaattgtttttttcctgaatattttacaaccagccttcccaaagatggcaacctgttttgggtcatttcttccttctagtttcttgttattacaaacaataaggtgatatagcctttttctctctaagtccccacaatcatattctgtccaggaatcaatcaattactccctattgatgaaaattatatacactgatataatcattctaatgtctcctctttccctctctaaaatagaattggaaaagtcaagaagtatttaatccttctgtatttagttgaaagagagtttgtgcaaataaactgaagttgagattccttccttacaattctggtccatttttgtaacagtttgtaagtgtaaagaatgcatcacttatttcttttagccggctggaaatccaaagtgaagtctgttatcatttctctttctcctttttgtctgtacatattatactcttatttcttcttaacccctatgctccatgcaattctatacaggagtggttggtaaaaccaatgccccttgggtaaatagtctttagaaaaaattccctttagacacaagatatagtctacagcttgtggctttcagtaaaatgtaatctcccaggtattcatcctgcacaatcatacaaaaactatgctaatattttaaaacattatttcatttagttcttacaatcacatgaattagagataatactgatttacagttggggaaactgatgtaactattttacagtggcaggtagagggctctgtcaagttgtctggctctgaatctctctctctctcttttttttgtaaataaagtttttgttcccccagcttaaagtaaaataaaaatggtatatatttatggtatgcagcatgattgatatacatatattataaaatgattaccacaatcaaatatattcgtcacctctcccagttatcatttttcaatgagaaatttcagatctactctcttagcaaatttcaagtatacaatacggtactattaacagtcaccatgctgtacattagatttctataacttatttatcctgtctaacaaactttgtactctttggccaacatctcaccatctccccctcacccaggccctgacaaccactttttaagatttcacgtatatatgagattatggaatatttgtctttctgtgtctgatttatttacttagcataatgtcctccagcttcatccatgttgcacatgacagaacttccttatttcttgaaggctgaataatattctattgcagagaggtagataatcacattttgtttctgcaaccattaatgaatacttaggtcgattccatatcatgactattgtgactaatgctgcaatgagcatgaaatgtacgtatctctttgagatactggtttcatttcctttggatacgtactcagaagtaaggctgctggatattgtggcagtttcatttttaattttggggggaacctccatactgttttccataatggttgcaacaatttacatttccaccaaaagcatatcagagtttcgttttttgcacatcctggccaacacttacctattttctttttggtaatagccatcagttgtgcatttgcctggtgatgagtgatgttgaacattttatcataaacctgttgtcctggtgcttgagctgtctcatataaataataggctttatttaaaatttgagtcgtataaagtggatgataacttttaaatgtgtctgctctatttattgctaataatttgatatttggtcaaggtaactttgacttgaattactaaaaatttgcctgatgactttattgattttgtgttgttttattttccagctagtttcaaaaactgatggcatgcaaaacagtgataaatttggctatttaagtactgtgccaaagttgatgtgttggcttatttgttgttggagtaaatcaaagactagaaaatatattaaaattgctctacctacttgccgtgcaaattatcataatgatacaaatgacttgggaaatattatataaaacattgtctgaaagttagtaggctattcgctctcaaatttattttctactcttcctccgctctgtattcatgagaccctaatttaccataatcccttgccttttaactttcagggaaatgttagggggcctgccttttatcattatggaagactgaatataaaattctgcattgtcagtcttttactttctggatgttaaagatgttattcatagttttcagtactgtctgctgaaaagtatgcaaatatattcatgtttgttcatctgaaggtaatgtgtcattgttcctctggccactttttacatttattctttatcattgtttttagtaatttgataacaagccttggtggtctcttcctttcttcttttctttcctccttatttattttttctgtgtgcaggataaacatgcatgcacacagaaaaatgacttcagatttgcatagttgtatcttatttattttttctgtgtgcatgtatgtttactctgcttggtgtttgttgaggttctcggaagtgtgggttgatagttttcatcaaattagaaaagttttggccaatatttctttagatattttttctggttcctgatcctttcagggatttttgttacacagatgttagaccttattaatgttccagaagtcactgagactcaatgacatattattaggcttttctctgtatttcaatttgaatatattctactactatttccatttcttaaaatttctgctcttcttttctcctctcctctcttcttcttcttatgtttgttctcctttactggagttcttaaatgtatgttataaacgctgttttgacatgcttgactgctaattacgttgtctctgactttgtttttaaatgtagctttttgtattattcagatatttcaagaccaacagatgaggagacaattgcaattgaaaagatagattattatactcagagttcccaaaagggggtggaaccagggtttgtctggaggcagaaggagcaaggggaaaatgtgggcaataacttttattgtggttttcatgggaaggagtggaagaggctgtataaacgggtttagaattggctagcttgaataatttcagggtgctgcaaaacatgagttatccctagttacctggcacctgacctggggtcgttaaggcagaggaacagtggtcctaagtgacagagactgtgaatacccggtttaaaaggcagttggagtgttggctgtggattggttattttgcatataaaaggcatgcttacagagagtactgtactgtttctagaactggccaactctgggaggagcagtccctcacagtcagcaaggcctcaagatgtcaaagcatcaaatacggaaactagaaaatgtagttattaccagatcttttttttttcttttttgagacagtgtcactctgttgcccacactggagtgcagtggcacaatcttggctcactgcaacctctacctcctgagttcaagctcttctcctgcctcaacctccagagtaattgtgattacaggtgccttccaccacaccaggctaatttttgtatttttagtagagacgaggtttcaccatgttgatcaggtggttctacaatttctgacctcaaataatgcaccctcctcggcctcccaaagtgctgggattacaggcatgagccactgcacccagctataagatctttatgtctgtttatactgattgatttttctctttgttgtgaataacatacccttgcttctaagaatgtttagtattttttgattggatgttgggcattgtgaagttaaattgttgagtgtctggattctgctgtatttctttacagagtgtaaaattggtgttggtatgcagttaagttactttcagattagtttgatcaccttgatgtgtgtttttaagttttgctaaagtggatctagaagagattcactccaaggatatttcagccctcctactaaggtacaaatttagttttccttatggaattatttttgtcttattattaatgaatatcatgaatgcttataaggtaccaagaagtggactaaaatatgcaacagaacatgaaaaaggtacagcctatatcattttctcatagaactgttaagtggagataggcatataaataaactaaatatgtgaccaacagtggcatatgaaaagtgagatactgtacaaagttttgaccaacagtaaaatatgtacatgcaaaaatatttaaattacactgtattcagtaaggtaggccctgaaaaagtctgttagggcttcataaaattgtatgtgctttagcatttgagcatctattgtgtactgccagcctagcattgtgctaagtcatagagatacaatggtaaagaaaacacatccctggctacaaggagcttatcatcttatgaggtacaaagacaagtaatagtgcttctagaagaataagtcatttgtgtcgtgaaactgtatatgtgtaagccagtcattaggcaccatggagaccttctaagatgaagctgtataaactaaaaacaaatgattattataattttgtctggcaaaggaataagaagattgggaaagtgcttagaagtgattcatagtagaggaaaaatcacacctaaaaacttagagccccgagaatagtgaacatttatggaatgaaagttatagtagtttgtttctggtaggacctgctagtcaggagtaatgaaatatggcacagagcaagacaaaataggcaggaagtggtcagccaatggagagtttgccatgaaatatgaaagagtctgtatcttatcttgagaagagtgggatccttccaatggttttcagcaccggagattatggacatgaagctcaggagagaggcctgaaatggtggctcatgccgaggcttgaaggattaatgtattagttcattagggctgcaataataaagtagcacaaattgggtggtttaaataatagaaaaacaacaaaaatagttctagaggctagaagtctgagatcaaggcgtcatcagaactggtttcttctgagggagactctgttccattcctctctccttggcttgtagatggccatcatctttctatgtcttcacatcattgtccctctctacttgtctatgtccgtgtttccttttcttgtgagaatactggtcatgctggattaaggcccactttaatgacctcattttaacttgattacctccacaaagactattccagaataaggttatgttctgaggtattaggggttacgacttcaacatatgaattttgagtggacacaattcaacccatagcacccccgtgtaagagctgggaagggaaagtggctaagttgtgcaaatgtgcacattggttggagatgattaacttctggcatgtagattcaacacccaagaagtgaaatacaatggataaaaatggctagaagataaagttgacagtggcaataacaatatggattagacttggcaaagttatgaagcaggaaaagtgggtattgaggcatcctctactttgatgttaggaaattattttttaattttccactgattttaatttataaattctctgattaaaaatttgttatagtcttacctttctagggcttggttactaggctatagtacaagttactatacactatatgtaaagagtattagattgtatttttgtcttgttaccagataaagtaatggtcatttaaagctatttcttccagccatgaagtcagggtatgattaaacaaaattccataaataacttgatcactatgaaatgaaatctgtcttcttatgtttggcattcaattgactacatcagatgttgtttcgaaagtcttttctcaacaacagtaaaatacacagcctgatattcccattgagaatagaccaaattcttttgacctaaaactagaactagtgagaaagttgtataaaaaattacacccatgttaaaatggatacattgctcttacctctaaatagacaaatactggaagcattacaaatgaagtaatgttttaatatttcacagctcaaaaattaagtgctaatgtatttttcccctgaatttgttgaaaactatttttattgcttgtggtactcctgagaaaacgaaggttctggattttgattcaagattctaatgtgtatattttctatgtctttggcttcattgtgttttttcatagctgacccagctttctgcagaaaacagggcagtcaatatatttggagccttgactctctaaactttaaccacacaagaagagacagactctctctatttgttacagttcctaaatactctagcttaggactgatattcacccttgaccaatcaactgtatctaggcccggaatcttggggaagggccctgccatcttgggtcaggtgatgactagactaatccgttatggtcagggtaacagagaattaatcaagtacattgaagctcacaggaagcacatatgtaggtgcaaagagttaggtggaacacgaggacagaagtaaactccagagaaaaggaagtgctggccaggcggggcggctcacacctgtaatcccagcactttcggaggccgaggtgggcggatcacctgaggtccggagttcaagaccagcctgacaaacacggagaaaccccgtctctactaaaaatacaaaattagccgagcgtgttggtgcatgcctgtaatcccagatacttgggaggctgaggcaggagaatcaacctgaacctgggaagcggaggttacagtgagctgagatcgcgccattacactccagcctgggcaacaaaagctaaaatctgtctcaaaaaaaaaaaaaaaaagaaaaaagaaaaaaaaaagaaagtgctgagtagatatccttccaagtaggtgtttcacaatgttgtttctttacataatgctgaaattaagtatttattcttaattcatgtattctgtaaacctttttgagtatctctgtgcccagcactggtctagggtttggaaatgagacagcaaacaaagcaaagtccataatatcatgatgcttactttctggtgtggacatggagatgggaggcaaacacagaaatgcatgaataaaataccttgtccaagacggtaagagtaacagagaaaagtgaaaaggggaaaggagagaagagaactgaagtgcagtgtggctgcattttatatgagtaatcagcaagcttaagtgataaggtagcattgaataaaggccagaggaaaggaaggagtgacccatgaggatctctgaagaacattctggtagagggaatggtttatggaaacaaacaaacaaaactacaataaacaaaaacttgtttttctctaatcatggtatatatatatatatatatatatatatgtagattagcatgctttagaaatttacttttctttaaataatatataactggatataaaacaaagtgaagattttactaacattaggtttggttaatcatacctatagtaaccctcaaagtaaaacacacactctattgccctccttatcccagcatgatacttacaagaacagaaaatagtccaatgcatgttaacatttgaaactaaaacctaaaaaagaatgataaatgatataatactcttcccacaataggaattatatttctaatttctgagatatcaaaagaagtaacattttaaaaaaaagttgtatatccatcccctaaccttctcttgatttatgttagagtttaccttagaaacaaacctaactttaccttagaaacaaatataattcactggcgatgtagccactcttgccatggcaactaccatgtatggccaattactaagatatggcccagtgactttcagggacgtctctatactgtactctgtttacacccattacagcattgagcaatatcaccacagtcttaatttttaagaatggaaaatgaaaagaacatttactgaagaaattggaggccaggtatggatactttagtcattacatttgtttagtgactgttggctgaataacataccaggcaatgtaaacagagtatttgcatttcccccaagttttctccaagactaccatagacatggagcctcagagtcatgctaaataaatatggtttaaaaaagactgacaatcaagaatatcaaacattaaagagagcctgattaagatatcttgggaaataaaaatgttggcagctgctggcagtgatgtctttgttactattttctaatttcttgcaaagaaagagatgtcaatgtatctgacagattcctctagttactactcagactggtgaagacaaactgccaaaaactgtgggttctttcactccaattaattctcccttctcctatctcccttgttggaattctatcaaggcaccattttgaccattttaaattgaagagtctgtcatccacttctgttacttctgaagaattttgatttcaagttcaaaacacaattaaaatatttactaaggttaaactagtgtttgagtatcatgtgatatatatttatttgttcttggagtaaacataacatttatttttccacaaacaacactattttatagatttattatttcagaacatatgatctgaaaaaagattttaaataacttttgatataaaatgatatcttcaaactattttaattatcaattactaaaatggcttaggagttcatgattagaatgtataaagaaaataaggcaacttcgagcttatactacattctactaaatgataacaaacttttggaattactatttgttctatatcagatagagttttacatgttataaaacaaaaaaaagttgatcaattttaaaacaatctttctatttatggttaagttatatcatgacaaattccttctaatgcagagctttctgattttcttagaaaatatgttccaaggttttaatgccaaaacagcgagtaaataatactccttaagcagtcaactggcacacaactaccaatccatcaagagttacagcaaaaggaagtagaataagccttggtatttataaaagaaagagcaatcaactcggagagtaactagatctggctctttcactaattgaagctgcagaacaaggaccaagtcatttgacactaaaattaccgccctcacaaatgcaactccaaggtcacatctctattttttttttctttaagttgaggtcggacagggtggcagagacattagtacttgttcatttttagttttcatttattgtgcatttgaaggttatacttctctgtctccttttagttaggtggagctgaagtgatgtgtgtcacatccaggaagagccatttaattgcttatgtgagactctagcaatctcttggaaattgtagaggaagatcatgttacaagggagttgccacaagattgaaacattcttgatttctaggtcaccaaatggaaacaagttgtcctggatagtcactgcgattcacagtaaactttctatgaacaggaaacaaactgtaaagggattaagtcactcagattgtgttctgttttgctactacagcatgatttaggttatcctgatgaattcagatattggaactagagttagtatgacactataaaaaaaatttgaaacgtaaggcactgacttagttgttgggcaatgttcagcttctaggaatatggcatgagaggctataagtaagacaaaggactgcattagttacggcacagcaagcaccattgttttggctctttttgtaccccgaattcaatggaggtaatgtggaaaggcccaggtggatggtgcatacgtggttggtttgtatcatacccgaagaaccctaagtttaagaaatctgaaccttctctgggctgcaagtaatctgtttgagctttgccccagagagagagagagattgtctttattttattggaaagcaaaccaatctaccttctgatccgtagggagataatatatcctccaaagctgtttgcatgctaacatccttaaaaaatttatctggaacaaagctagctggtgcctgtgctcagaagacatgcagaaatgtaagaaacccatgagaattgcctcccaacccactatttctgtttccttgcttagtctttcccaatgcatctcaaattctacttcttcatgaattttttttctggactccaccagtcaagtacatttttctccttttaaccttgctgtattttgtgtttctcttttaagacacatattagtttgcactttttcactgtttatgtagttctttatcaccgaattctgagtattggaagtttctggatagcagatactgtgtttcattcatccttacatctcttgtaggagatgatacatcttttacctaactctcatcctatgttttagaaactgttttactaacataatatagcatggaattcttatgaatcagataagcaacagtcctaagggagatacggtcaaggcatcagaatacaacaaaaatacctaaaataccttttaaagtataatttgctatagtcaaatgacattcctgaaatattcaataatgagatatttttagtagagtgcaacctgaagaaaatctagataactttgtaattatgttatctgttataactagtagcatgaaaacatttttctaccattgctgctgctaccaccagcatttacctcgatcactttttgctgctactaccattagtttgttgctacagcgggttttcaaattacatgttttaaactttgttattttattttgagatggagttttgttcttagccacacctggctaattttatatttttagtagaggcggcgtttcaccatgttggccaggctggtctcaaactcctgacatcaaataatctgcccacctcggcctctcaaagtgctgggattacaggtgtgagccaccgtgcccggccacatgtttttaactttaaaacagtgcaaaagcaatatgcatttagtagaaaccatacttcgaattttggattttgttctgtttcctggctagcaatatatggtaccataccctctcatcatgccggcgagcagagaaagctgcagctcccactcaaccacgcaatcacaagggtaaacaaccgacacttcttacttgatatcttccttaagaacactgcacctgctaaaccatcaacaagtgttgatgccccagtgccttctatcagctattctcaagcctcatcagaataaagagaaattgatgaccctgtcacttcagtatttccatcatccagcagttaattttagttcaatgctttaaacattcttcacgcctggtgtgctttcagttgtgtatattcatggtgagtactcatacaaccattctgtttttcactttcagtacagtattcaactaatttaatgagatattcaacaccttattacaaaataggctttgtatgtagattttgcccaactgccgcctatgtaaatgttctgatcacatttaaaggtaggctaggctaagctataatgttctgtaggttacgtgtattaaacatatttttgacttacaatattttcaacttgatgacaagtttattgggatgtaacaccatcgtaagtagatgagcatctgaattctatagggtgctagaaactgtgctatacacttcatgatattgtctcttttattatattttagaattttatatagggatatatggatttttataatcccaaaggtcagatgaagaaacagaggctaccagaataacctgcccaaattcacgtagtaaataagtgatagagttgagattcaattttttttttttatttagtgcttaaggctgaattcttaactattatcaaagtggcctgtgtatgagcttataaagattcaccagtaaatacaacatcaaccaaggaggaaggattctcccatattgattacattttaaaacaagtatttgattctgttcaacaaattgaagtgccctattctattcttaggtactgagaaaggaactgccatatgactacagatggtcttcactcttttgattctttcagtagtgtttgtagaataccaatttataaatcaactgtaaaaacaaagagaaaaagaaatcagtcagtggctcttagaacaagtcacaattttgtgataataaagtacaggatatagtgggtagattttcccaaatgtcaatcaatgtggtgataatttttaaggattttaatagttgaactttaacattcaaaatcaacatcaaagtgatatcttgattgttgcctgttgatcatgggaaaggatggtgaagaaggttattagagaatattttttggtgagtgctattgggcatcttaactctagtgttctgatttgtacagtcataaccatggcatgctaaaccaagctttctggattcattgccattcactgaaccatgatatatagagataacattttttaatggaagaaattaggttctgtctcatgtcaaggcatgctatttaaatctggtgacttttgaagtatgagacaggttttttttcattggctttggctttggttgtttttttcctttatgagagtctcacactgccaagttttgaattttgcatgttcaggttattggggattttgtttttctgagtgcacgaagagttcaagtttcttaaaatagggaaaattattgctcccattcccctcccacttaaaacatgcttatagttcaacactatttggtttaggttaaaactaaaaataagttctttcaagttatgactaaacaagacaaatttctgcttaaaactgcttcttaaaaagtcctatttgagtgtaaagaaagtggatgaagaatgacttttgcttttgaaatttaaccctaacaaaaaatatccttttctggaaaataactgcaaccccaaactaccagtgctttctaggtgtgtgagcaactgttaatattaaaacctgatttttgttattgatttactagccttagtcagcatatctcatttttaatttttcagtcttcaaagtagagagttgcttgatttgcacacattccggagaaagtacatcaccagaatacgttggtcaaagaataggaaatttcatttaaacaggagaaatagagtcaagagatccacatttaatacagcatgatttctatagttagtaacaatgtatttattatattcttgagaagtgctaaaagtagatttgaagtgttctcaccagaaaaaagaataggtgagggaatgcatatgttaattaactcaatttatccattctgcagtgtatacctctcaaaatactgtgttgtacatgataaataaatacaaatgttttggtaaacttaaacaaataaatgagggaaaaaaaagaaaatatgttattcacactctgaacatgaaaaggtagtttgaaaatgctttctcagaaacactgtcatactttaataaggctgagctcataaaaacattgtgaggaagatcaatcattttagcttcctctcaattgtgctttttaatgttccttctctccaaaggtctctgccggctgttccatcgctatcccaggcccttcttttagaaagtcttactgagatttttttcttccttaacaatgttgcctctggatatagaatgtctcccaagtttttctttccatgattccctttcacctacatctcttcactttcaacttcccctccaaagaaccactcaaatataactttctgatattttattcaccattcattcactcagcacttaccaatatatattcaatgtctactctgggttagacactactgtaggcattgaggatgtaggaatatacgagacggtagatccctgactcaaataagtttatattctttataaataagtagccaaataaaaataaaagagattcactaattgtgatggttgccttgaaggaggtaaccatggagatgatggggagttactagatttggtggtgggtgatggaggcagtgtattagacaggaaggtcagagaaggtctctctcagatattattctgcttagatttaaaaatctgataaaaaccagttgcatttaaagtcaggggtgaacaaggctcaacctgttgcaagaaatgtgtccagagaatggtctacatgtgatcaaattatatgagataggatgaaaaagtggggaggatcctacttataaaaatgtcttaaagccattgtaagatgtttggattttgccctaagaacggtgatacgctattgcaaaatcagtggtttgacagttctaaaataatgttttgacctaacagtgtaaagtcaggtgtatttctttgttgacaatgcattgtcttgatcaaattagtggtcctaccatgaatgaaatttcaggcaacatgcaaagctatgtctcacactgaagttatagtgagtctgttaaaaatgtttctttaaatctcattaagtaggcacgtggttattttgcctaaatgaggggtggtcccttgatagtttttcctcccaaacactatattttgagaaacatttaagaaatctggaacatgcattgacttttcgtcagcgatatctgtgaccttgacatagcctgaaaattttatattagcttccaaaaattttaattaattcatttagaaaattcgattactaaataccattctcagcataatgctgtataggttagtatcaatcacatcacagaaatggttgagaatagggaagttcctatcctgaagtagtctatacataaatattactaagagcaagtcttattagaagtaagtgttaagctatattttatgtttcatgttcattattgtttttggagtctttctttaagctccaagcaacattatcatatatctcatagtataaaattgttgttttagttgacctttctgcaaccatttccctagttcttgcccattaattttggtatagataaatatgatatatagctggtgtagataaacaggatacacaggaggtagatgaaagaccactggacccagggctgacttcacagatgtgcatccaggtcctgtgttcagaaagacctcactctgctgtcaccatcttgaaaagcttatttatttttcccttgaacccatgtttcttcagagagatttgatcggacaatggattggacacttcacattttattttccactgacctccaaaaattatgtccttttagagcaatcatgtcatgcacaggttattaaagccatcatttcctctgtttctttgtaatcaccagaccatgcaaccactgtaaatatcagctgggcatcaacagctttgaaagttttgaggaatgaaataagcttccacggtgcattccaggatggtaaactacaaataaaatatatatatattttttgtaaattgtaataaaactttcttaaaactgtaaatcttttacaaaactgtttttgctaaattcttatgctgttagaaccagcctttcaaactaagggtcggtaggtcaaattcagcccacaattatgatttgtttgaccaacatagaagtttacaaaatatgaatgtgagtgcttttaaatggggcctgacattccagagagccactggcctaaccatttaattgttttttacaagataatttgtttacccttcctggtctttcagagcatttgaatttgcaattctgagctctaaagtttaatgtctaaaacagtggttcctaaattttagcatacgtgtaagtcacctggctagcttgttaaaacacatattccaaacttcctccctggtatatctgatacagaagggctggggtagaactggaaatttctagcaaattcccaggtgatgctggtattgctggtccaggaaccacactttgaaaaccactgatctaaaacagtaactgccattcttgctatttgctattaactgcaataagcttcatctactcagttataaatgagattatctaaataaaacatacattttaattagtcaagctagctaaataaaaagtttagctatgacagcatacattaactgaaacaattagtgagtcagccaaatttttctcccttgaataaaaaagatcctgctattcactagtattattgcaatcctatttcagtgttctccacttttttatgcacatgctttgctttttccaaaattagtaatacagccttaaaataacccagttaaaaaagttgtaaagttgtctcaccctcagtaaatatcaaaagcaacgaggtaatggaacaagattgttaaggctgttgatgattgattcacattggacaggctcttatcctactgtcaaaaagtggtaagtgccctaagcccaagatgccaatgttttcctagacatttaagaactcaggaataatcatcagatatatgcaactctaagctgaaatagaatacagagttcaacctggagtcatttccctcctcaatcacctttttgagacttacagtctcaagtcagtcaaagaggatttctcagtagtcatcatcagtcatcaaacactcaccttttagaggatatgtgatactgcaaactggtgactaaactggtttttctcaatataatgtgtcctaaactccctctttaggtctgctttccatttatttaataacttttcttgggtaatggaataggaaatgactttaagagaaattaacatcttaattttcccttttttcatttttttctttctgcttctttgtgtgaggagaaaagggtaattattagcatgctttaatttaaagcaccagtggaattttctctaaatcttgcctttaatgggttcattaattttacttatttctctaactatcatcaggcttaactataattcatttagtttttatattcagatcatccattttctgtaataaagggagattgtgagaatgtgaataaattaattccacagtcctataattatgtgcatagctttttaaaccactaggcttcaaatcacttgaggatctgtctcatttatctttgtctcacacaatagtgaacataaagttggtattgtagtagacattcaataaatgtagatcaaattgaaatgacccccccaacacacacataactttttgctttcatttcttctttattaaagaagggtaataataatctacatctcgcgggtttctccaagtgattgtgtaaaacaatgtacttaaagctccatgctaggtaataaatgaacattcaatctgggtttgcgtttaattattagtaggcatttttactactttcatgattattatttgtattaatggttccaaactcccctatgctaaatgctctaatgaagtttattttcctgagcaagttaattgaactgggctaccttgtatttttgtttcttctgttcaatgttttgttaattctttcatattcctgtagttcaattagtttgatgttgaatctgacatcaataaaacattaatctgtggtagatcctgaagacttgggaatataaaattataaactgtatatttattatatatatatatataaactacaatagatcaaaagtatacttgaaaaacaggacattccctctctttaacagctaattctaatccctattgcatgttttactaatacatgtcacctcattaaatttccttttctccgaagatttagtcacaaaatcatgtcaggacaagaattagaagacctgggctattccctactctctttctttgggtcaaataaatcattcagccttttcaggatattggtctcctcaactgtaaaccgagtaatctctatcttagaaataatgctggccttatggacttgtgaactttctttacaaggttgcccaaaaggctgcccaggttgagcactgcacaactcagtggtgcaattcacatagatgcactcggcagggatgactgcttcttctccctcttttcatccatggaggagtaggttaagtaaccagatataccactttttccttgcattaagaagtatggcctattacagaaattatttacgcacattaccaaaaacaatcaagagaacagaggatattaaccacacttagaggatttactttctgtttttaccacttaatccttaaatggaatggctcttggggattctctagaattgaggatttacagccagccataaagactgtttagggcaggattataaaactaaaaaaaatcaaaaatatattcatctaagaacacctttttttgaggaaagggtacaaccacccacttttacatgcagaatgtccagtagatagaagaaagccctagctatgtttgcagcttatggcacttcacatataggagaatgtgtggctgtgttataaacccaaatgagcacagctgttagaaataaggtgctgtctatggaattcaggactgaggccagatttgccgctgtagcacatctttttttaagcacgtgattccacatttcacttcaccacttgatttcagggaactcagaaattgctacaggggaaaaaaagcataatcaattcttactattcactggaatgatgccaatggaaaattaatgagcttttctgtaattgttgaatagtctcaactgatgaattattgggccctctaggacatcatccaaagagatctacatggtcacagaatgttaaaactggtaaaagccttagtcgtcatcttgactgtatctgacccaagttaagcatgcgtgcctctggctctgggctctgccccttcagtagggtctgcactgtgcctgctgatgcaggagcagaactggctctgacaccccggtctggcccaactgcacacacattggctgtgctttttccatcatctgctgggctcaaagaatcagtatggagggtgagatatggcttccctaccagagaaacttggatggaaaacctaaaagtacagaagcattaacaacaattggggcaagctttcatagtgagatgcaggaaactgaaaggagcctgaagatgccctctcctccctttcttcacgtgataaatttttgaaatctagacatacaacatgatctcctggagacatttgtaatgtctaagcaacagactgtttttctttgaaggctgtggccagttcaataacttcctaccttttacttgctttctttccttttgtgtcttgttttccttcttcttccatgcttgttgccctgagattatatctcctctctcccctcaaaatataactgtgccagcttcacatgaggcttttttgtttgtttgtttcagaacttgggcaagacttgtttacagaagaggaaactgagactcagagcaattaaattacttttccatggtcaaagattgcaaagtatatattttttaaaagtttgtttcttttgctctcattatcagctatgataaagctaccctgttatcaatatccaactgaagcaccccgcttcaccacatagcgttcccacactttgcaatttatgctgattgttctctcgattgagtaaaacaaatgctttttgattttgcctttatttgcatcttttcatctcacaatttcagacggagcatgccttatctccatgtgaattaagttccctgagaacaaggagcccattttgatttttttgttccccagagttttgagtacagcgagggccttccatgaaggttttatgaagagctccgcttcagtgaaagagaactcttctctccagtaacagcaggactctgggggaaccctgcaccaaccaccagaacctattagaaataccaaatgacaaatgtttcttatcctccagttctcaggcctagcgtttggctctttatctttaacatcatttcgtctgccctttagctttttttgagtcttgcattaattattttatatgaagagtatattctgtctgaaggtcaaaacctataagagaacatgctgcttccactacagcttccagaaaacttgtaaaacctagcatatagttaagtgccttgaaggtacacattattaattaagatttactacatgcgtttgataaaggaaaatttgtaaaaattataagtaaaagatgattatagtaggaaaagcaatgaatttgaaatgagtagctcggcattcaaatcttagagttataccatctgtataactccctttcctcttctataaaatgaggaaggttcctataggaccctaatcacaggaaagatacataacaatgtgatttaaatattgttaagaaaaaaatatatgtcacactttcaagtcaagtcaagcatatctctttgaaatggataaatgaggtagtgccaagccaaattgcaattttttttttttttttttttgagatggagtcgcgctctgtcgcccagtctgcagcgcagttgcacgatctcggctcactgcaagctccgcctcccgggttcacgccattctcctgcctcagcctcctgagtgggactgcaggcgcccgccaccacgcccggctaattttttgtattttttttagtagagaccgggcttcgctgtgttagccaggataatctcgatctctgaccttgtgatccgcccgcttcggcctcccaaagtggtggtattacaggtgtgagccaccgcgcccggccccccaagctgcaagattactttcggggcatttgtcagttttgagctgttccatctcttgaaatacattaccttgaccaacagggcatcattctccctttttatcctcttttctccttcaggatccttttcaggatttttaagtcattccctacacatatatcatgggctcatctcattttaccttccatagtaagaactacttctggggaaaaataatctgttacagacagtcgcaatcaagcaatctcatgaagcatgactgccagtgagtctatgacttattccaagccctgttaatgaattccattttgggtcagtttcagaattctgttgtttgtgaaaaaaatgaactaaaagaaactcacttaatatgagtgctctgtgagataacctggaaagtgaggtgattgtataggaggggtcatttgagctggatttatgcagacttgggattcaagtagatagtttcacttcctgtgtgataccttctcagaatcctctcctttaatttattcgattactgtctcgtttacgttctcattgtctctgagcaagactgtagagacactgtctgccctcagctctctgtctctaatatttccaagggcagcagctctgtattgaccatctcggtcactatttttatttgtactactcctgtatctaaatgtcttcatcactgttcctagcctctttgaaaaactcatcccagcaaaagcccatcattgacactccattctagagtacaaatttgttctagcaaaaactttcaaataaaattgatttctgtggtgttgcccacatgcaaatgcttattctaaactgtggctttgagcatatttgcgtagttgttttagcttttggtgttgctataatgtttgttccactgtgttttcactcactgaagaataatacacatgatctttcttagggctgatttttcctacctaaagtatatgttgaaattcaatttcatgttaaacttttggagttaattttaagtaaatctaaaactgacttgtggtgatgggtgagatgggcatcaggaagtagaataacatcgaaaatttatcaacacaattaatgtatacctttaagggcctagaatagtaatataaagaggcgtattcaggttggttaatatgattaatttttttgtatttcgaaatagaaaagagatgagctctatatttttttgatttttaactttgttctatttcattattttcttaaagacagctgttctggaagaggatagtaatataaatgtgaaaaagtagcactattaatcagattattatatgactagaatttcaaatttctgtgcattaatggcaggaattagtaactctcttttcctttcaattatttattcagaattaccattttgttttatgcccatcactctctatatttgttttaattatttttataagcttatatcctgtattttatgttttctgtatatgatactgagcttgtttcaacacataacagtaacttatgctttcttatctagtgtttcttctcccttttttccatagaaatttcttgactaagtttatttttaattataattcttatttcagacataaaactttaattattaggtaattgcagcttttgccattactttttaaaaatggcaaaaaacgctattacttttgcaccaacctaatgctataatggagaatagtcattttaaaaagtagctcaatgtttccatattttaatctttatttctcaggtgaaagagtattaacattggaaaccacttttatgtaagcctaattcctgcttttaggagtgaagtaatattctaccaacatttacattttcttgtacctttccaaccccatttccttctgaaaacatacatgaagatttcagtatgttaatcctgtttaagtctctaggttaagattgccaagcacagttggtttcttctctttaatgtatctttctttcttcattagactgcagtcaacagctcatttaattaacaggagtaagagacaaaatgcaaatatttttagacctctgtagaaagacagaaaaactcgacaccttgtcaaatcaacgttagatttttgacgttagataggatcacctactttttaaatctgtgtagttacaataatatcttttgagttattggaattagatttccctgatgaagaaaagcttgaaaattgaattatgatacgaacatttagtatggttgaatatcatgaggctgagtgagtattaaatagtttacagaagaaaatgtctggtgttcactccattaatatggataaaaatggaggaaaatgaagcatctgatgttgcatcagtatgcaatatcattaacaccatttattcattaaatatgctatatagcgtacatcagttaggtatttatatgtccattttttcatgtcagaaacaacttgtgccacttaacaagagaacttttcatggttctgtgtttcatccttgatgcctacattattacttggttctgaacagccctgaatagctaaccaatcaaggttaattgagaaaaaagatatcactggctttagccttatcatgatttgatgctttagtcacctgtggttaagtaacttagacactaccagcttggtcataatagagtgggcattcctggtttcataaaatcacttccatgggtaactttataatattatgatagatgtatgaaatatattcctgaaaaaaagaaatgccctttccattacatgcatttggcattgatatgtgctttataaaggtcgtttaagatttggcagtcctctgacatctcacaataattttcacaatttttagtacaatagtaaaatgttcattcttctaaaaatcattcttaacttggactgactgaataattctttgtcatttcttaaatgtgcatggaaattctgaagagttctattgttcctcctcaaattttctgaattaattcaatatgaagaaattatatttccttcagtcatttttaaattaaatttctggcttcttgaagtggaagatggaggtggaatggagtagaggtgtggtgagggggaaaatacatttaattcaactattaagaagtcacgttttgtggcaaatggtcacctgcagatcttttattaacaccatttatttatttatttatttatttggttactcattcatcagtcatactacacaccagtcatatattttgactgtctattttcagcacctatttgagattaaaaaggtaaataagacacggtccttaagctaaaggaattcacagtcaaaaggactacgtcctacctagattaaattacattatgctttttacattgcattatgctttttaggaaattaatgaaaactttttacttcttccacaattattagcaatcaaattttgaaagcatgaaacttatgcagagcaaggaatctttcaaaatcaaaactgaaaaggatgaattatagaatctggaatgaggttttcaaaatgtagatggagcttatttgaaaacagagacattttcattagctttgttaagcaatctatccaatgaatagaatcaaatgagaacccttagatttttaatttagcctttagttccaaagaaattttgtatttatgacttactttatataaaaaagttttaaacataaccaaaaggcatttatgcttaaaatattaccaatcccgtatataatctattatttaatgtcttcaattttttcacttgctctcataattttatttctttttttctgcagtttattttttttagttaagttccaaaatatggcccatgctttgcatctcttggatattctctgaagtctttttaatttatacacttcctcttccttttttttttatccttgcaaattgtttgccaaataaacaggctcatttgatctgtagagttttcttatattctggactttgctgactgcatcttgcaaagtcgttaatatgtggtgtttttgtgtgttttctgaaaatttctagcaagatatagatgcttgctcagattcagctccccagtttgtgataagaatcctcctccataggtggtcatgtgtcttctattgggaagtatatagtgttaggttgtttctcttttgtgacattaggagcaattaataatcattgtctagttgcgttattttattagagttcaacaagatggtgatattttaattcaatcatcacttttcttttaattaactggactatttttataaagacaatctccccaaagtattaatttactctaggtataactcgcaaaagaaaggcagttaaatacttatttttcctttattaatcagttagcagaagagagaattggctctaaaccatcttccaaatgtgataaacagctattttcacctaaatatcattagaaactcacagactttagcatacctgatatatttgaatttattgcagtttttattaaattgatgctaaatttggcagtggaccatcatttgtttccttttacaaaatcccagtagtctctgatagtttctttgctttctggtaaagcaagattttctagacatttgtgtgcatttcctgtctgagacctcgaccagttcttttcctgaaaatctctgatttcttgtataatgcaaaatgattataaaagaccatggtctgaatactagtacaatttttaagcgtagaccatttactgtgaacatactggcaaacatgaatatttctgtttcttcttctactgctagaatatacttctctgtgtgctttactattgacttgggattcaacggatggagtaaaaggggttttactgaagatgacacttgtcactttcaagagagagcacttaagaacgagtgtagaattttccttgggctattccagtgcaaggaatagaaactgttcaaaatcataacagaacgatgaatctgtcatcagcttgagtgattacagagctcacagccactcccattgatccacattcatcatactgcacacatgagagttaaccctttgtctttgaagcctctgaaaaatttgtataatatactaccaaaatataattctgactggtgtaacattttgtttttacacaaaaatgaatgctatttcaactttctgccttaccttcaatccacagtctaaaactggtgaatacagctaaacttctatacctcactaaaggcagttcattctcttttagaactttcaggttatttatacttcttctgacatatggttttttaaattgtaatataatgactctaagtgctgatcaccttgtaaacatacctctggattgttttcagtaagtcctgatttgaatcgctttgtcctggtgctagtctatgagacatattagattcactgattttgtttaagtgcaaatgtatatattctgtcacgtacatattctgtaaattatattgtgttgatgatttgactaaataattccatttttttggactatggagatataatgttatgtcatagaatattttcaatgtaggtcattgtagcaataaacttactttgttctggaaaatattttggtgatgcataagaatttcaggctccaggatatctactactcctgctatatgactacatataataaagccctcttctctgtgacagagtcaacatataagataatgctggcacaggccaggtacttactggatatttattacatgaaagaataattgtggctgctatagctggatcttctttgagctcttagttgatttcttttgtcaggaaaaatagattcataatgttaatattttatatacatttacttgaaaatttctgttagagtcagaataagtgcaaaaaattgtgcttgatttatacttttttttgaaagtatagtagggtgctactggtgttccacctagatccccttcacaggctagtatgcacatccccccactgctagaagtgttggctgcatatcccccaaatttaacccctttcccacatgggaagtgcttggtaaatagttatactccaatgccaccaccatgcaaatgactgcccatagtaaatgacttactgatatggggtacaaaggccaacccccttgcctcaaggtgggccaactctgtggtgtgatttttctccagagcaccctgtgaatcaggccaaggttaaacttcacctgagacctcatccttgctcagctctttgtcttccttatattgtttctctcactcccttatgttttttttttccttttcatgatgagcaatccatcaatacaacatatgtatccaaaaattcctgttttaggctctgtttctagaacatctgatctaaaacagctggttcaaggagtggccttaaaaagcagtctcaaaggatagattttggagttgaatttatcactggctacatgacagtgagtaccacattgctgaaggtaggtggagaatctgtgaatcacagttccctggaatcctgcagcaattaaattgttaagatttttcattcacaatgaactgagtgtataagtctgttctcacactgctaataaagacatacccaatactgggtaatttataaaagaaagagatttaattgactcacagttccacgtggctggggaggccttacaatcaggatggaaggtgaataaggagcaaagtcacgtcttacatggtggcaggcaagagagcttatgcaggggaactctcatgtatgaaaccatcagatcttgtgggacttatttactaccacaataacggtacgggggaaagtgcccccatgattcaatttctccacatggccctgcccttgacacatggggattattacaattcaagatgagatttcagtggggacacaaccaaaccataatattccacccctggcccctcccaaatgtcatgtcctcacatttcaaaaccaatcacactttcccacctgtcctccaaagtcttaactcctttcagtattagctcaaaagtccacatccaaagtctcatctgagacaaggtaagtcccttcctcttatgagcctgtaaaatcaaaagcaagttagttactttctagatgcaatgagggtacaggcattgggtaaatacacctgttccaaatgggagaaattggccaaaacagagggtctacaggccccatgcaagtccaaaatccaacagggaagtcaaatcttaaagctccaaaatgaccccctttgaccccatgtctcacatccaggtcatgctgatgcaagaggtaggctcccaaggccttgggcagctctgcctctgtggctttggagggtatagcccttttcctggctagtgtcatgggctggcatcaagtgtttgcaggtttttccaggctcaaggtacaagctgttggtggatctacaattctgggatctggaggatggtggccttcttcttacaattccacaaggcggtgccccagtggggactctgtgttggggctccaaccccacatttcccttccacactgccttagcagaggttctgcaagagggttctgcccttgcagcaaacttcagcctggatatccaggagtttccatatgtcttctgaaatctaggcagaggttcccaaatctcaattcttgatttctgggcacccacaggctcttgcatcctctgaagcaatgtgctgaactctatattggcccattttagacactgctggagctgaagcatctggcatacagcgcaccatatcctgaggctgcatagagtaggagggccttgggcctggcccaggaaaccatttttcacccctagacctccaggcatttgatggaagaggctgctgcaaaggtctctgacatgccctggagacattttccccattgtcttggggattaacatttggctcctcgttacttacgcaaatctttgcagcaagcttgaatttctctccagaaaatgggattttttttctacctcatggtcaggctgcaaattttccaaacttttacactctgcttcttcttgaaagctttgccgcttagaaatttcttcccccaataccctaaatcatctctctcaagttcaaagttccacagatctctagggcaggggcaaaatgctgccagtctctttgcatagcaagagtgtcctttactccagttcccagcaagtttcttatctccatctgagtccacttcggcctggatttcattttacatatcactatcagcattttggtcatagacattcaacaagtctctaggaagttccaaactttcccacatcttcctgtcttctgaaccctccaagtatctagaaagttccaaacttttccacagttttccattttttttttctgagccctccaaactgttccaacctctgtcacccattttcaaagtcactttcacatttttgggtatctttacagctgcaccccactctactggtaccaatttactgtattagtctcttctcatgctgctaataaggacatacccgagactgggtaatgtataaaggaaagaggtttaagtgattcacagttccacatggctggggaggtctcacattcatggcagaaggcgaatgaggagcaaagtcacatcttacgtggatgcagacaacagagcttgtgcagggagactcctatttataaaaccatcagatcctgtgagacttcttcacaaccacaggaagagtatgagcaaaattgcccccatgattcagttatctccacctggccctgcccttgacatgtagagattattacaattcaaggtgagatttgggtggggacacaggcaaaccatatcactgagataaaatgcaggtggaaaagaggcactggcttgggcaatatgtggtgtttgagagatagagggaaatggtaactaaaagactaagatattgagtattgttcatgatttgagaagtgaaaataactggccctaaggagatcaaacacaaattcagaaagacatgtgaatgtcagagtctcactggcagtactttaaaagcctgagaaatgaccaatttaaaaactaggtttattgcctaatgataagagtagaacttaagagataactgaataatcagattatcaaaatgctgccaaagtaaagcctctcataaggaataagtggggacttgaaacttgggtgggaagtgctcttaaaacttttgaatttctagattcttgtaaaccccctgaacctgaacaagcatccccctcctctctgttgaaagacataacctctccagatcccacttgcttgaagacatctaagagctctcaaatgtgtcagttgccttacaagacaatgcttgctgtcttagtccatttgggctgatgtaacaacaagatactatagactgggtgatttataaacagcatacattattttctaccggtctggaggatgggaagtccaagatcaaggtgcctgcagattcagtgtcttgtaagggtcttctcctccataaacaaccaacttctcactctgcaatcacatgcagaagggctgagggatctcttgtagtccttaggaacactgttccaacccatttattatgtgatatgaaaggtcatttgctgtaagtgggatccagagaaagatatttcttggcagctattataagcagtcttgcccatacagccttatcatcctgtagagctcgtgatactagaagtatcagtggtttaaaacaaaacaaaaagataccatgtgcagtctgaaaaatatctaaaggagccatgcaatgaaaattcctagtgtcctgcagcaaggttatgccatctgtagtagggaaccatgcacgctaaaaaagcagtttctggtatgcaccgagctctgctccagacagagcatgcaactgtagaacagtaagtggccctgtctctaaaactgaccaacatgagctggatacgctcagagcccttaagttatgagtttgggtacatagtgggaggaaagatgattttcaatgattaagagttggtgacttccaaagttaaaataacatagaaatctctcattctctctactctgctaataggtatagaagcatgccatgttttcatttaaagcatcagcagaaggcaagaaagaaagaatactttgtattgattgattgattatttgggtcaatgccgcttgacagattctgaagaacaagaggcgagaatgttttaatctaccgtgctttgtatattagggagaacaaaaatgaattcttatatgtatatgatatttgaagttctagtgagagaagtagacttttttgaaagtgtgatgttgtagaatgaaaggaggacattgttggaaataatttatgcaaagaaaaagaagcaatagttctaaactcaatatgatattaaactccatacttattctataacacttccaaaacagtaaggataattttgcaatggtcttcaaccgattttcagtttttttatccaaaggaatatagactgggtgataagcatctctcaatctaaggaagatagtaaatgatatgaactcctctgagaagactttggtaccaaaaagaatattcaagattaatttgcttccctttcctactggggaggatccagtaagtaagaatagcagcgtatattaaaaaataaaaagactgactcataataatagttttccccaagccacgacatcaataactatctttgccccttcagcatgtgttctgaaggtagagggattgaagtactctaggtgggctccagacttaaatgaacaaatgatatgcatgtcatctctgatactctgcaaaacttgtgattccatgatcctatgagctgtatgcctttacagtctcttggtgatcactaaaagggaccaactctttttttttttttttttttttgagacggagtctcactcagtcgcccaggctggagtgcagtggctcgatctcgctcactgtaagctccgcctcctgggttcacaccattctcctgcctcagtctcccgagtagctgggattacaggcacccaccaccacgcccagctaattttttgtattttttttttagtagagacagggtttcaccatgttagccaggaccaactctttatttaacactttgagagtgaatattggaagtttttgtatatacaattttattttgggttgcctgagacacatctcagtgcttctaatgaagacaagaacttgaatgaatgtaccatgaaaactgaggactattgaacaacagatgtgaaattgcaaggtgtattaatttgcattgtgtgacgatcacacagatgtgtttcttgtttatattcagtccattaagatctgtttagttaatttattctctttgtttaaaagggaaaaaagcaaatgaatgtggtaaatagaccattaaaaccaaaaatgaaaaaatgccttcaatagttatctatttaatttggtaattagatcacatagttaatttaaatgtttaaaaaagaagcaatgactaaaaacatgtactgatctccaataaagtagcccctttattgtttgtttgttttcaaaaaaacaaacaggtttgaatttaattcactcaaccactaaggtagaaaacaacggaaacatagaagagcacataacactataattaatcacaatactttctagaatatttaattcctattccttcatagctaattatacattattcaatgaatccattttaaattatgtttccaggtaaaaatacgtattgcatggtatgttaaaattatgtatttcccaatataataaaatcttttataagtttatatcagaagtcatcacactatgcttctgagggctagacacatctttttttgtaaataaagttttattggaacattgccatgctcatttgttctatactgtctattgctgctttcatgctacagcagcatggttgattagttgcaaccaagaccttatggcctacaaagcctaaggtatttaccatctttctcttgacagaaaaagtttgtcaacccctaatccaatacataaaataaggtaatagagaatatattttattagctacattatatattactgctttttatcttaaattagcaaggcagtagctgttttagacatctctctctctctctccctctccttctctcctctgctaataggtatggaagcatgccatatttcacttaaagcttcagcagaaggcgaaaaagaaaaaaatattttgtactgattgattttatttgggtcaaagcctcttgacagattctggagaagaggattctaataatagccaagattaccgctttctggtgctgagacctgtttgccagtctaacaaaggtagccaaaaggacttagaaggggactctctatggtgttgtagagtcctcaagctgcaagttaccttgaatctactctcagggtagccttcaagtgacaataacacaatttgtttctattctttaaaatgaattaaaaacttgacccatgaaaataatttatttgcataatttgaaataattatgtttatatattttataattataaatatataagataaattttgtaatatataaacataaattatataatcactgattataaaaataactatttttatttttagaaagatgaacaaataaggtttttcttctcggactcttagactatggcaacatgttagaaatacaacctgcagaaactttgagcaggttgtgtgtgtgcgtctgtgtgtgttttggcaccaaccataaagtggatcctttgcatggggatacaacaaagaaatctttaattgggtggtgtgagctgtggtggttaaataaacttgtctggccagaaagagttgtttaggagggaattccaggaaaagtcacaactgggaaggtcaaccagttctgtgggtgggtcattacattcaggaattcagtcagtatgtgtgaggtcagaatcctgggaggtctgtccatgcaggaaaaggaagccaacaagtaggtttgaacaggcaggatattggccctgggtgccacatgggaaggaagagtaaaattatacattcagccattggtttctcatcacatggttcaagcctcagggcaggaatccagcgtacagagggcagagggtactgggcagtgacaagtttttggtctaaagggaatataaggacatttgacccgaaccatcaagaacttaaagaattatggaaaatagaggaatgagcaaagacaaagatatctcaagcctgaaggaaagagatatttgagggaaattgtgtctgttttcaagtcctagtagaatcccttgcaatgtccctcctccctggaaggcaagaggagattctgctcccagaacaggccttggagttgtggctagtctaagctttcaagttcaccaaaagacacaaaacaagacagagtctgatattcaatggggtttcccttagagatatcaaactcctgtgagttacacaatctaatccactcaatttgggaaagagagagagtaatgggaatacttcttagacaaatgtcaaaatatacttattgaattaagaagtagtagccaaaatgttctattatgaaatattttgtcttctcaggtcagagtcagaaatcatgaaactcccatgatgagtttaacttgtcagtctgatttgtatctcctgtgttctggcttttaattccttcttattgtctctatttcacaccacattctgatttcagcatttctgacaccagtatgctaacccccagttttttccaggaattcagtttgatatgtcttctcaacctatggcatattctggctccaattaacctgctttagtgcttcagcaagaggggcttaaatccctcccatgtgaaaaatgatgacgatgctattttttacgttactatattctgcttttccaaaatccatccagccagattatgtcctgatagcatgttaacgctggtttgcatgggggactctttcagagtaagggtgccaagatttttttttattgaattatgatgataatcaaaggcttttagtaactattagattaacttgtataataacagcaaatcataacaagacagtgtcatgaactctagctttcaattctgaagtttagacaagtgtgtacttgtatgtgtgtgtatacctttatttgtacttctgagaatttacgtaatttatttactactcattctctaagtcatttgaagaaaataagttaccatctaaagaatggaaatttaaagacaaacaccctaaaatgagaaattaacaaggtgatgttagtattgacttataaactcatgcttcaagttgaaagacaaaccattgaacttcatatatttatatcagttctcttagccttcatcagttctcacagccttttaaaatgctaggtaaacatatatgcttgctatctttcaggtttatgtttggtttgtcaaagcatacactaaataattttattctgcataaaatcagaaagatactatttttaaaaataaagattgatacatgcgaaaaattgcatggaaattagagacaatgtgaaatgtaattgaatagcagattagttggaatagttataagagaaaatacaaactgtgatagttagggaagagacgtaagaagtaaagtagcttggatggttcttccttacagtatagacattgaaaaacattttcaaagcttaagtaagaaaacaactcaataaaattgagaaaagagagatgaaaatatcatggagggatgactgttcacttttggcttaactatagtaagactctacacctaaacttttcataagcataaacaaaatttggccaaaaaatctagaattcattaagttattgatagctacctgatactagttcataaagtaagggattaatttctaatttataggctttaactgtgttttgccatatgtacttacagccaactggtggttcctagaatgatttcagatggtatattaataaacatttcaaaaaatgtatttaagtattaaatatgtattttaaaaatataactgtcacaaaaaatgatctgttaggtagttgcccaaagtttgtttgtttttttcccttggctgtatgtatataagttaaaaaaaagagagtaagttaaaaatgaaatattaatatataataaaatgtgatataaagattcggtcaaatatacgaaagtgatgtaaaattaacatcttcaaaaccccaacatagaatgccaataaggctagacctttcagggactgaagtgttcccattcaccattaggctacttccctcatagttaaggtatttgggaaatcaaactgaacatgaaaaagttgattagcaagcagaaactcaacagcaaggcatctggctagttttgataactatatcagcaaggtcatataaaaatctgggatccacttgagaacaatgtagtcgagttctatgatgttggagatactatataaatacattttacgatattcagtagctccctgtattatcaggagatggtctttataggcttaatttttaggaaggtccagagagccggctcctgaaaaattaacatgacacccttgaagaaaacaatgtttatgttgacttctgaggaagacaagcgtcctgggaaaacaggcactcagcctgtgggaggtgtcagcagaaaatgtatccccaacaggaaataccaggctttaatcaatggaaaggtgcttttattgagtacaaaataaggtcatattccatttctgctctcatttctcagcccgctctttcctagtatgtaaaataacttacagagttgcttggaacattaaacaaaataatgtcatatggcaagcactcaataataacattatgattacttgtcctgagaagctggtcatatgttgtgtgtatgtttgagaatggtgattgcgaaattgaagaaaccattttacttggagggacctgtggggaatgtgggcagccttaagcatagatctgaaatcactcaagggaaaacattccttctactttggcactctggcagcaacagctgctgtggtaagcactgaggtcctggaagcaacaaggctgaagtggccgtgaggagtagacaggagtgggatgaagaacaccttgagcttccagggagtttctggggagagaaagaatgaatgattttaagtcccaaagtagggccttgagagcagcataacatggtgctgagctgatagactctgaagttcagcaggatcagtactaattgtgtggccttggacaagttatttaaccttttgaaatctgttatcttgtctgtaatgtaacgaggatggtgatgggaatgactgtctcagaacactgctgtgaggattaaataagaaatctgggtgaagtgcccagctcagtaaaaacactcagtaaatactggctcagaaggaaaaaataaaacaaaatgtaaaacaaacaaaaataaagcattgttatctccaaggctgtagtgtagagaaacaaaagaatgcatttttataactgaatgcatttgtcccaagtcttgacattctgcacacagtggatccatagtcacatataaaatgcatgtgtctttcttttttcctactgaagccataggcccctttagattttggcacttactgtgaaagccaaacagcaggaatttcttggccacatttaaggtgattgatcttttattttcagaatatcttttgtcagaatgtcggtgagttgcatctctgcacgtaaccttgaaataaagatgagcagcttttcttctccacacttaaagtgtcctttatttccagggaactagcgacatgctaatatctctgaaaatatcttccttaaactatttgataagatgcttcacagaaatagaaaacaaggggactgagtaccagttgctctagagagtcacagccttgaagttatgagcccctagggaaaggccactgggaaagtgctgagcagactaaggaaatacttcaatcagagcagaataccaagatagttgcctatgggttagatttaaaagattagtggaatatacctcactgttcacaggaaggaaggctatcactgagggtcttcctatactggaatcctcatggaacaaagaaataacattgaaatgttgacatccaggcttgtatacaataattttaagattttctgcctctatttctagattcttgagtatttagttatggtattcccaatgcaaaaattaatcctcaggctatgaaggacaaatctggcttcaaaagtactaaggcatcaagaaaaaaagagaattaagtcaactaaaagaaggctaatgcctgaatgtatcaatcgaattggttttattatgattgctttggtccatgtaacatgaaatatttacacaaattggaaaagcttgcataggtccttttatttgcatttgtcagctctattgtccttctgaactcactatgcaaagagaaaattccttttaagcattgagaggatgatgaaggcatgctttctagttctactccttctcccattcattcatgacatattaaatgagagataatgctcaggctaaatacataaaaggaaattggtcagtctgctccaaaaaagaaaaaaaaagtttgagatctagagaaaacaggagagagagagagagagagagagagagagagtgtgagcttaagaaacatctatctgaattctgaaaagggagagattaacaactagaaaggtgtgagtgacttcctggaggtcttggaaggcagtttggtggctatggatgagagcagagtccagcttcagatggctgttgttcaaatcagactcaactgtttgctaatcatgcaatgttggtcaagttacttagtattctgggtcctaatattcttacttgtcaaaaagtggtaataatacaacctacttcaatgcccggatatattaataaattacaaagtggaaagcacttaaaacactacgttacatttagtcaactctacgtaagtagagtttcacagtaagtgccaaaatctgaaggtacctaagtcaataggcctgccctgaactcaggcaggttccattaatttacatggaaaagtatgcaaataaattaggttttgtgttcttgttgtccttgtgtgttccctcatgaacttgttttctgacactacaatgctaagattacggtattgactatcatctcttccccatcttgtgtacatttgtaaagatgcatgttagtcttggctgccagccataccatctggtcctagtggttaagggaacagagaggtaactgaggagataattttttttaaagtgttcatgaattagatatgtaagaactagttccttctgaatcaaattatgaaagttagtatgtttggaataaaaatagctaaggatgtttaaatatggacatttctgaagtaatccttttaactctgtccttcacctaaagtaacaaaatggaatgctgagactaatttaattttgatagcctgaatttctatgctgttttaaatatagtttaatcacatagcttgtttaggaggacatctgtggtttaatgggaagttgattggaattggaattagaataatgctttccaaaccgttgtctgtaggaaacaggtcccgcaagatgtttgcaagtgttctatgaaaagagatttcttcagcaaaataagtaggaaaatgttgaattagcagatctcatttcagaacccaactttgccatttataggttatgtaactttgaaggagccgcaagttttctgaactccacttgtaatatctcacaagtttgtttggcttttttttttttggtggaataaataagatcatgtacatgaaagacctgagaaatgtgtccttgatatatgtcaatggactcagcttcagcattccaatgaaatgggcctgaaattgggcgctgtttttcatgtggttatcattcaagtttagagagaaagtaatgcctgtaggatatggaaaaattatcaggttattagaaagagttccatctgctacttctgacttggatataaatagaaaaactgctaatcctaaaaaggtttttttttttaaaatgcttgttttaagggcatattttctctttaatgctttttttctattaaaaaacccttatgtatctgttttaccaaccggtaaagcaaaccaaaaaatacagaaaaaccaaacatcagaagaaaaaaataatctcacgctttatgatgttaaaccatcagtcaagaatacatgcgattttaaaaacagtgaatgtacttaaagctatgaatagttatgaaaaatagtgattgaaatattactatgggcttagaaaaaaaactatgaaaaatagtggttgaaaaactagtattattcaaaaagcaaaacagctaataccatgttggaagatatgtgaaacaagcagaagtctcacatgctgctggtgatgatataaagaggtacaaccattctggaaaactatttggaagtatacactaaagctggacataggcataccccatgacccacaattctagaaacacgtgttttccaaaagacaggcactagaatcttaatggcagtgctatttgtaatagccccaaagtgagaaactgtttaaatgaccatgaaatgtatagtggccaaataaatggttgtctattcacacaatggaatattatgagcaagagaatgaataatctacaactttaagcaacaatgcaaatgcatctcacagacataatttgaatacaaactccagacataaaagggtgtgtagtatttaattttatttgtgtaaaacaggaaaatctagctatgttagaagttaggatagtgattacctgagaaaggcagtaactagaataaaaggcaataggcctgccctgaactgagatgcaggttctatttcttgatctggtactggttacatggatgtttgtaaaaatgtattgagctataaacataagttatgtgtacttttcggtggcatatttcactctggtaaaaagataaacgaccgggtgctgtggatcatgcttgtaatcccagcactttaggaggctgagacaggcagatcatgaggtcaggagatcaagacaatcctggctaacacagtgaaaccccatctctactaaaaacacaaaaaattagctgggcgtggtggcgggcacctgtagtctcagctactcaggaggctgaggcaggagaacggtgtgaacccgggaagcggatcttgcagtgagccgagatcgcgccactgcactccagcctgggcgacagagcaagactcactccgtctcaacaacaaaaaaaaaaagataaacgaataaaaaatctagcccctaaacagagtgtttccagcttcaaaactgaaaattatctctaggtgtttcctgagacattcagagactgatttctgttttgtattagttgctttttttttctttctttttacacaacattaggcttgtcctgctgcggtataatgttctatatttgttattgtctaatgaactctttctatccttaagttattttaagtgctcatcaagcaccaactagtaagagcctgaagaccagtctgtgtaacagaccatttttaagtagtgccatagctgtccttgctgcaaaagctctcctatctccagtcactatacgaagacaaagaaataacaatacagaaattatcgctgtatcaaatgcagctaagtcaaatccagagagtttaaatatacaaacaaataactggatctttgtaattggtgctgacaagatatttcagcaagcagaggaagaattctaaaaatttatagtttttcgaagtgaaatttaaagaatttaacagttaataaattattctgcaaaatgaaagggatctgcaattgggcatcaactgtgtatttcagtaaaactataggtttataaacacatttttaaaaataagcatacttctgggggttttctcctcttcttcctcctcaccttccaaaacattagggcttttctgctatcttcttttttgcctattttcgtatctcacagctcacttagatgatgtaaacttgcaacataaaatcaggaagaatatgtgagtagcactgacttcattaaaatgtatttgccatgaaaattacaggttagaaattggagaaataaagagaggattataatttccaactttatagtcttttaggaaaatgagaatgattgctttttcttcagtagtggtgtgtgctagctgctaaattaaatttaaataaacttaaatattgctaacactgaaaatgtctaaataaaactttataatattaataagttaaaataaatagcgcacatcactacatgaggaagaatacatttatagtagcatccttctaatatgcaagattaaactgtctggtaggttagactatccaataatttaataacattgtgtttttaggttttagatcatgaaaagagagttcgtgatcatgaaaatataaatgggttaacccatttatacctagtgttccattattggaacactaagcctgtgggagttatttatatcctactgctcaaggtcatcaccaaggtctgattgcaaaaatttaaaaaattgcaacctcaggcctaaatgggatagccaagtgccttaaatttgccttcagctaatgatgggttcatggcaagaccttgcacttgggatgttacttttgaaattaaaaaaatgtgatcaaggaaaaaatataaaaagaagacaagaaaaacttctttaaaaacatgataacaataaataatctggatcaaagtatgatttagatgagaggttgtctactaaatcatcagtgaacaaatattccatattcaattatactttttatagtatgttgttattattgttgtacttttagtagtgaattatgcttcaatagtttgaatagttgtatccacaaaaataattaccaaggtatatgcaagaacttatgtacaattatattcctcatggtatcattttaacaaaatagaaaaagctttaaagactgctttctaaaactatttgcataagaattgggttaacagtgttgaaattgagtattgtcccaattctctgaataacccgtatatcctctctctacctctatctctcatacacacacacgttaaaaccacctatagccaaagactgagatgaatctaaatcaagtttttaataagaattaactatgaatgatgaaattacaaatagttgtttcaatattctgagattttctgaaatgctttttttgccttctgtgaatatgtattccttttgtaatcagaaaaatattttttagatgtttactcctttaagtctttgttttaatggtgtcttatagtttttccctagtatattgcctaaaattgtgaatcctcttcccaatctacagactttaaatttcccttctctgctttatttttttcagtacttaatactatctaacaaacatattatacattatatttatttattgtatttattgtttgttatcccttatatatataaaatatatacaaatataatgtataatatatgttattaagtactgaaaaacatatatatatgttttgaaggccagaattatttcctgttttattcattggatatccctaacacctaaaatgagccctagtatatagcatgagctcaataagtatttattagttgaataaaggaattacttttctatatatatatatctctctgacatatgtataataataagcctacttcttatgctaagcaatggacattgtaaaggaattaaggtctcatcctcatgaaggagagattaaaaattcaatgtttgcagtgaaattatcaagatcaaatgaaatattgaacatgtcttttccttgtgaatttaataccatctagaaatgtcaattcctctgataaggacttttatattatagcttttactaatgttgagaaccgagtatgttcccgtaccatggtgtgagggtatttaacttttggagaaaggcaaaatactcagagtagagagagctgagtgatctttgtggagaatacaaacatatttttgatgctgtggaaactcaattctaagaaaatttggctttccaatgtttggacaattcttcaattcccagttataattgtatggagactaaaagggtggcagccttgtagcagcttctacaaagcctggctggtaccccagatactgttgagttccatttgaaacctggcaggaaaattaaactccagttctttcatccctttctcctgctgcttgtttgctttggagctttgaaccacactccttaataagtgttaacaagaactttgaaaaggaacaagtagcaaagagaaaaacaacaagagtaaagaagaaaagtaaaacaaaaaggagaaacagaatggaaagcaaaacagaaaggagcaattccaaaatctttgaagtgattacacttgatatggttgtatatgacaatctggttcattaccaaaacatggaaatggcatcctccaaaattttatcatttcctttaaactaaatttctccaatgtgcaagttactgaaagtgaagtcacatcataaccaaattgtaataaaccagatttaactactgaatagtagatttatcctggttgttagtatcattgaaatgactggactgccaacatcatcatctttattttcttaaaaactagacttgatgtttgaataacctgatgttagtgattaaaaaattaaaagcagcaaaaaactcaatttgttttatgtggatatcatttgaatgaacagttactagaaaacacatgtccttagtttattaaaatactgcttagtatcctaaataatgatttactaaaaagttgttacatgaccttaaagagggtaaacaattatataacgaactaaattaattctagtgcataatttgtgcgccagacaccaacagttaaaatagggctaaaaagatgatttaaaagtcatttacttctaactttttatttatttatttttaattgacatacaataactacatatttatgaagtacatagtaaagtcttgatatgtataatgtatagtgatcagatcacggtaattagtatatccatcatctaaaacatttatcatttctttgtgttgggaatattcaatatcttccttctagctatctaaaactataattaatgttaaccatagtcatcttacagtggtacagctcgttagaacatattcctcctatctacctgtaattttgtatcctttgacatgtctaattggttaatcaattaaaataatatttattgatcatctccaaacacaattctagagcctgggatgtacatcaatcaactgcttagtggaagagttttacataatacacaaccctgaatccaagtgagtcagaagagcatttatgtcttgctcatggatctgtgagctgtctgtaggtctgctgagcttctctgggttaggttgggtttggatgggtacaattcaggcactgggtataattcagatctgctgtacctgtttattaccctaagaacatggcccaagaaacagagactgccttggacatgctcttttcatggaggaaagcctgtatttaaaagtggcacactgtcatttcttcccacattccattcaccagaacaagtctcagagcccaagccaacatatgaggagcagtaaagtgtactcttcccgggggaaggagcaggacatatttgctgaacaataatttttttgttttttgagacagagtctcgctctgtcacccagactggagtgcagtggcgtgatctcggctccctgcaagctccgcctcctgggttcacacggttctcctgcctcagccttccgagtagcttggactacaggcgcccacgaccacgcccagctaattttttgtatttttagtagagacggggtttcaccgtgttagccaggatggtctcgatctcctgacctcgtgatctgcccaccttggcttcccaaagtgctgggtttacaagcatgggccaccaataatttttttaaaaaaatctatcaagggccaggcacggtggcctgggcaacagagcaagactccgtctcaaaaaaaaaaaaaaaaaaaaaaaaacaaacaaacaaacaaaaaactatcaaaagtatagtaatgaacgaaacagaaaaatatacttgcacttgggagagaaaaataatagtaaaataataaaataaaaatgcatagatgtatattagaacacaaaattttaaataaagtgctgagtatagcactcattgaaaaggtgagctttgagtaaagacttaattgtaatgatggatttagctgtgagaatattagtaagaaaattatttcagggtgaaggactaatctttgctaaagacctcaactgaggatgtgcctagcatgtcagagatagaacaaggagcaacagtggctggaatgacctgaacgacaagtactgggtgaagtcagagacgtaatggagaaaggagcccgaggcaccgattatgagtccctcaaggacatagtaaggactttttgactttcactctgagtgaattaggaagccactgaggtagagaacttaggcttaaagatacataatttagaattatcagtgcctaaatggcatttaaactcatgggagaagacaaaatcaccaaggagctagtgtacatcatgaaaactgaagaagactaaggacacggtagtagtgtccccaatattcacaaaaaatgattgtcttgtaggatgttcccttcactcgtgcctactcaacaagaattaaaacattgcaaattctaagtggttttcccatcaattcactcttctaattcaggaaatgtctgcctagctgcacaatctatctattatagcgaattagctcttgtccattctgattagtagaactgtgcttattggctcctaagcaacttcaacctcaccctgatctgggcattcctatcaatgtctattgggcctctctttttatggtaccaatatacaaaaaagtgataagtatttttggaagaacaatagatgcgtactctcttttttagaattattaatattttctgaatgctttaattttataagagtaaaagagattctccttttagaatatggctttttatcttaggcagattttgtaaaacactcaaaataatattagttactacccatgaaaataactaatatgtagattcaattcttctatctgcattttctttcactatttaaaataaaacttttaacagctttattagctatgattttaaaatcattcctgttttagccttaagtggtcagcttatccagtatacactatttaggtacctgaaggccttaaactgtcccttaattttcttttttatgacaatatgtaattatgtaaggggagattcatttctgagatgcccccttatattctaggtaaatttactcttcatcagtccatggaatccctcctaaattcattaattctacaaagcatgccccaaagctcatctctcttgctattgttatgagcatagtttcctcctttcaaggtttatatcatttttcatttcattaaccagataattctctatttttaataataataaagtaaaaaaatacttttttttttttttctgctgacacccggcactttattagtggggaaactcgccttggtttggcagagactgggatggacaggaccagcgcccatctcgagggggtattttctgcaagatcaggtgttcctccttgcaggtttagaggaaacaccctcatagatgaaaaccccccagagagcagcgctgcaactgccaagcagtcggggtaggaggggcgccctaggcacatctgggcccttgagacagcagggcttcgatgtcaggctcgatgtcaatggtctggaagcggcagctatacctgcatacaggcacaccgtcagggcccaccaggaacttctcaaagaagttccaggcaacatcgttgcgacacaccggagaccaggtgatgagcttggggtcggtcatgagctcagtggcgtcgtccctgggggctggccggcgtcccgcagaaaggcggagagagggtgcgcccccgcaccgttcacctcgcacttctccaagagcatgaagctgggctcgaacccaccaccaggttggacgtacttgagggaattcagaatctcttcgttcttggcgttctcctgatgcccagactggttgcacgggaagccaagcaccaccaggccccggggccgaggcgccgctgcggctcgttcatctgggtgtagtcccggaccgtggtgcctccgagggacgccacattctcgataagtagtcccttgccccgcagggagcccaggctcacaggctccccgccggccagcgggcgcgcgcggaaaaggcttacaccgactgggcagccgccgccgctagcccagcagcacacagggcgcaactgtccgagaagctaggggagcgccccgaacaaacactgtcaaaaaaaatactttgaataacaaaaataatagtaatagcatttattaaaatcttgttgtatcctagaattatcctaagtgctttatgtttaactccattaatcgtcacaaagtattttcattttaggagtgaactaatcacagagagatgagaaactttctcatggttaattaactcaaatgaattaggtaaacaactagtaggtggccattctgagatatcattttaggcaacccactttagagggtgtactctttaccattaagtaattttctttggtgtttccacaatatccagagagagaaaggtgccactagattgcttaaacatttactggatgctctcttcatagtctaacacattccagcattcatttaatcatcatccatccatatttattcatcatctactaatgacaaacataattcgtggtactcgtgattcaatgatgggttaaacagaattatcttaccttcttggagattacgctttacatttacagtggctatttagaagagcggtcactgttctaagtactagatatctcgtttaatccttaccagcaaacttacaaggtaatagatacaattatcttcacttacagtgaaaagagcaatactcggctatatgaagcgccttgctcaaaatttcagagttgctctatcatatgtcagttaatacatttgatttcattcaacattcagctaatattaattgatcacattttgttttcaaggcacaattataatcaccctgtgctactacacagtattatggtagaatagaaagagatattactgagtctgcagatctgagagtacttaacaatgaacctgatgggagtttaacaggtgaatttaattccagcacagaggggacagtccgctagaagtatatttaattcaaaaaaaaaaaaaaaaaaaaggcgggggaaacagatgtagttgcatgaaagaaaataaagtgtaataaaaatagtgtggttggggcataaggtgactttgaggtgacagaagggtacaagtagataaaggtcaaaagacagtttgactgtgaggctatgatccggaatttggacttgtcctgttaataacaggttcatctctgaatgcttgaaagcagaggcattatcccagtatctgtggacttagcaagatagctctgacagtgttatcaaaaattacaaaattttatatgagaattcataaaatgaagtctacgtctctttaaaatattaatttgtgagggtttttttgtgggggaggtgttctctcctactctgaaagttcaaaagtattctaatctgtatcatagccttgaatatatcagtcagtgcgacagaactgagtatacgcgttcaggaattttttgtagttactcatttatcctggtatttataacactcattaaatttgaacccagctctttttgcaaattctagtagctatacaatcgtaaatacaagcatgtgaggttccagtggtgatttgcttttcaagacatttgaaaactgctttttatttttttaaattttaccatggtacattatacagcagtaactaaacatagatctgaaactggcacacagaggaaactctaaaaataaatctgtacctgagataagaaagtgctctgggtctctgcaaacactctcactttagagagtgtagtcttaatcaccttcaaggtaaaagagatataataaagtacccaaccgtcttctaataaaaacaaatatttatattctatagtacctgaaactgtattaaataccattttatgcattactttgtatatggcaacatattttagcaatattaaagaatataacatgagcgatatgattacttaaacagcattttctttaaaaaccatttgtaaaatgaaattgattttgaagttatcaaataaagaattctcatttttgaatgagaaactgaagcctcttgaagtaaaaactcccttaaattcacaagtgcactcggattttctgcatccaacttcaccacccttgcaggcacatgacaacttgtgaaacaggcaggccccaggatgaaagtctcgaattcatagacaaatctgagaatcctacaaatccactagttttctcaaggtcaagcggttaatgagtggctctaccatgagtttgttttgatgcctgaaagggagtagtattatcgtaaaataactgcatattttatcaagaactttataaaaaagatattatgattcacaactggattttatggaataattttggttttcaacaaataccatgtttaccaatatgtggtaatatttaaaaggcagaaccctggcatggccagctgaagtctgcagggcctccattggcttttgcttgaccttttcctttacatattctataatgtgactcagataaggcacaaagaaataataaaatccgggtcaaatcagatattccaaaaactaaataatttttgtcaactaagcattttttgtagtgacttaccttaataaaatattttagtttttctatcttagtacatgtatccaagataaaaaacacaatttaagttttcttttaagatcagaggacttcattggtctaaggttatttttattttttcctttctataatactttcaagtatcacagttggagagatgctatctattgggctggagagtgtgatgtgtccatttcatactattggcaatggaactgatttttgattgataattttggtacataattttcaattccgtgttgtattctgaaagacacattctctgaaacatcttatatataatctgtatttatatatgccaagagtaaggttgttttattaattttttttatttttttatttttgagacagagtctcgctctgtcgccgaggctggagcgcagtggcataatctcggctcactgtaaccgcctcctcctgggttcacaccattctcttgcctcagcctccagagtagttgggactacaggcgcccgccaccatgcccgtctatttttttttttgtatttgtagtggagacggggtttcactgtgttagccaggatggtctcgatctcctgaccttgtgatccgcctgcctcggcctcccaaagtgaagttaaaaataattagaaaacatacaatgttttctgatgaagtaggaacggttaactaacttttcactatattgccaataaaaatcctatacttcttggtggcttaagcatttcatcagttttttagagttaaagtatttggaacataattttagtggtagaatttctttctataacttttgaatcatagattaacaaatacctaccaagaactgagaagaaaaatgaggaaatgtaattctaaactattttactcattactaatattttttaataatatgtaaacaggtaacaatataacttgaactatataattgtttgaaaatatttttcttatgctttaatttcaatttattttgcagactttttactgggtgtctagtaagttctagatgttgtaataggtagcaaagacaagacataagtaagacatgcccttttccattaaaaagactattagaggagacagttaaatcactatcatctgtaccatagaatttgttaagttcatgattggggtgaacaagttctagaatagcactatacgataggataccaatgccaggagagccacaaatatgagccacatatgtaatttaaaattttctactagtcacattgaacagataagaattaacagaggaaattgactttagtgatatatttcatttaaggaatagataaaaaatattttcattgctatatgtaactaatataaaaatgatcaatgagactgatatggtttagctgtgtccccacccaaatcccaatttgaattttaactcccacaattcccatgtgtcataggggggaaccagtaggaggtaactgaatcatgggggcaggtctttcttgtgctattctcatgatagtgaatatgtctcatgagatctgatggttttgaaaagaggagttaccctgcataagttctctctctctctctctctctctctctctctctctctttgcctgctgccatccatgtagtatatgacttgctcctcccttgccttctgccatgactgtgaggcttccccgcccatgtggaactgtaagtccatcaaacctctttcttttgtaaattgtccagtctcaggtatgtctttatcagcagcatgaaaacaaactaatacagagatgttttacattctgtttctctattgagtctttgaaattcagcatacatttttcacttatagcatagtctcaatttgggccacccacagttcaagtgctccatgaccacatgtagctagtagctactgtattggacaatgaggtctagatcaacaaaagggctgattactagcacttgaaaaaaatcaaagaagcctctctgaggcagggactcctgaaccaagacagggaatgtgcaaagctttgagaagtgtagtgtgaggagcctcaagtcatacagtgatatggtttggctatgtccttacccaaatctcatcttgaattgtagctcccataatccccaagtgttgtgggaaggacaaagtgagaggtaattgaatcatgggggtgggttttcccatgctgttcttgtgatagtgagtaagtcttatgagatcggatggttttttcgagggaagttcccctgcacatgctgtcttgcttgctgccatgtaagacatgactttgctcctcctttgccttccactatgattctgaggcctccccagccatgtggaactatgagtccattaaacctctttttctttataaattatacagtctcaggtatttcttcacagcagtatgaaaatggattaatacatacaatatgcctagagtgaaggaacaggagaggagggggagaccagcaggaaacagacttgagagaacttcattactactctgcacctatatagccactgtccaataatttctcagccctgtaacagacctatggcactaaatctcaacaacctggtcctattaggaaagaaaaaagtttaattaaattccttctttgtgtcaggaaaaaaaaatcattgagtaaatgtcactcttaagcaaaaatgccatatgttttcattttgaggctgttgtggaaaccatcagcccagtcccttttcttcctagctgtttcttactttgaaaggcaaatttgcaaataactgggaaacctaaaggattagctcatgtttttcttggcctcctgagattttgcttttcagatgcccatactacatgcttgaattccgtgctggcagaagatggtaaaatatttggattcatttggaggaatggaagaaaaactgttgagaatattggatgcctttagtttcttttacatgacattctttcacacaaacgttaggacaagcaactcctaattgcttaacacacagtatttacttaaatatagactactgggaagggacagagtgccccagagagaaatcattcatttttccgtggaatacctaccctttgtatacttatccaattgaagaagtacatagcaatagtccatgatccctagaaattttgcccagcaacttgcacccaggaatattgctaagtttgttttgtaagtatttagtttggttttgttttcttttaatttttcaaatagaaaagaggtatgagaccaagtaacttttcctacttttttgttaaaaaaaaaaaaccataatttttcccatcaaatgaatttgagagaatgtcacgtgaaaaataactacgtttcctttgcttatcttgttttaagctcttcttttcatatttgcaatgcaagtgtgtactatatacaatatatattttatatatgtgtaaatttgtgaagctaagtacacatttacttttcttcttctatttttattcttaaagtgagtttcttcaacactccatttttacaacaatttctctcttagcatttatcctctgtttctctcaaaccacacctaacagatgtggccaactcttatatggagtttgtttccttttgcttctgtacaaaatcaccacaaacatagtgtttttaaaaaaacaccaatttattatcttgctggtctggaggtcagatgtcctaaaaccaagtagtctccaagggctgtgtttctgctggatgctctaccagagatttctttcccttgcctcttccaccttttggagcccaactgcttgtggccaagtcttgtatcttcaaggccaggggtacagcatctttcaatctctctatcacatctgcttctcttttcatagctcctctcactggctcctgtctttcccggtaaagacccttgcaaggacatttttcttcctggataataccagataatcttcccatgctgtgatctacaaattaatcgcccctgcaaatttcctttttttcatgtacagtagtatattcacaggttgtggaaatctttgggaaggaggaaattattcttcctatcggtgttgactctcagcctctatctctagtctcctttaatttcccaactgcctgtgtgtgcacacgcacatcaaacacaacaggctcaaagacgaatgcctctcccacaaaactgattgctttgattccattgctacgtcacggatacaccacctaagtaaagagttatcaagctagagaaggattgtcctaaacagggcattttcatccccacttgcactaaagctaaaacctttctttaatgtacctcttaaaaactttaaactgtatattctctactttatttctactatgaatacctttttcctggtttaggtatggtttattctcatttgaactgctacaatagcctgtgctctctgtctccaaacctgctcccttaaaaatttgtattctctatggcttgatctaaaatgcaaatttgatattttcctagtgtcaagtcttttaatatctcttcactgcctatatcatacacattactttccattgtacacgaagccctccctgatcttgtctctaattatttttcaaccttatgttttaggccttgcaggacttccacattgcaggactcattttcctgcttgtgattcactttgcacttgcactcactatgttccttgatctgtgtttctcccattgtaaatctggtcatgccttggtaataatatctttgcactgtgttgtaattatctgtgtatgtgtttttctaaactgtaagcttttagaagacatttcttatttggttttacatccccatcatttggccacgtccttagcacaatgtatatttgtagtaataaacactgttctttgggttttgtaaattcatgagcagaaggcatttaacccttttaaattataaaggtggattaatttaaatattcttggaggttgaataatttgtgagacttttggtttcatgtattctgtttgggagatgcaggaaagttgaaggaaagtatagaattttgtaataaagcaagaatttatcctggccacctgtagaaagcatgtgagcttttggcgaaagaaatatgtaaacatacattaaatacaatatgcttatctacaacttccctgcgcatgaaatgtaggtcatgttggtttctctgtctctgactctctttctctcttaaacacacacacacacacatacacacaaaacactatgcttgacagacatcataagtcacttttcccatcaatggcttgtttcggggtggtttcagggataggactgtttttaaaagatccttttacactctttttcaccctttcttctgcctcaccctggatttaacctaaccacaacctaaacagttttcaatggcagctctgcttccatccatcacatatgctgcttttttttttctttttgaagtgttaatttggcatatgagatttaaacacaactagttcattttgaggagtctgaaatgtcctactaactttcactggttacattttggtagagaacccacacaagttctgaagcaattatccctgaaatttagttttgttcaaggttgcttaacatagagagtaaagaagaaaagattagtcactgattgaaatcgtatgaaataatttttatctcaagcagttcctgctctttgtatatatatgtgtatgtgtgggtacaatcttgctgtgtgtatatttgtttatacccagaacacacatgagaatgttctaaagacaaaaaagacgttggaatgcctttcctaaaattcagtatttgcactaatatcactgcatgcactaaaataagatctatcctatggaaagttctttactgcaaatggctactgtgaaaacagtgaacatttgtattcccttagctacccagtagatcgactttctatcttgggaagataagtatgcaccatcctttacccagggctgccaagatgtggccatgtgtccctgtgtctgccaatcagataccccactcaggacttgagaaagtggcacaaaaatacaaagacagacaaatcgcttgagaaaggggcagccaagatcccaaagtgctagagagagtttccagtgattgggattttctaagcagatagtttttaagggaaaatcatggctatgttcccaaacactcatctctcttcatttctgtcatattctgaacctagtgctacagactttcattcatttctggagccatcagattgccttcttgcaaacagcctctacctattaatttactagaattgacttgtgtcatttgcagtgaagaacactgactaatttggttaggagttggtgagaaaagaatactgagaagagaggtgtcttaggaaaagttacctcagaagcaaacttcaaggcaagaatatgagtagcagtggtttatttgtaaggtgacttcagtaatcattgatagggaagtgggcaggtgaggcagaaggaaaggatgtcatgaacagtctgcgggtgagggtaacataattaattctgttggagaagagcacctgatgggtacacaagctgatgtatttatcctcaaagatccatttttcatgggctgagaatacttcctggagatgttagttccccagtgtttccattccatctagtgcacagattgaggcaagactcctggcctgagagccacaaatgcttgcagtaggacactttctgcccatgaggtaagagtgagtaataaaggcttgtacagagagcactaacactgtggtggctattgtgatgtttcaacttgcctttttatacaatcaaacacaaatacaggtgttgctgtgaaggaattctgtagttgtaataaagatcctaatgcattgtctttaagcaagagggattattctggataatgtgagtgggcctaagtgaatgagttgcaaagccttaaaagcagggttgatgtttctaagagagagagagagagagatagagtaattgaaagagaaagaaaaagaagaaatttctcttgaggacaatttcaacctgttctcagggagttccatcctgtttgtgatcttgctttcttgtggatgatagcttcaaccatagccacaggttcaaaactgtgccttcctgaatgtctgctctatggatttaggactttattccagtccccacaaccatgccatccatctatctatctatctaatctatctatctatctatcatctatccatctatccatctatctatctatcatctatcatctgtccatccatccatctatcaagagagatataattctaatacctgtacaatcttaaatgttctgcacctccggttgaactctgactggtgtagataattttggtatttggaagtaggtgctgccataacaaacacacacaaatatggagttggctttgaaaccaagtggatggaggctggaagaagtctgagaaaaattttgaaagatctgatgatagagaatgcctaaattgtcttcaaccgattgtgagtcaaaatatgaactttatgagcctttctggtaagggctcagaatgaagtgaggggcatgttattggaaacaggaagaatggagatgcttgttaggtaatggcagaaaatgtagtggaattgtctcctgtgagaatagtggaaaatagaatttcctctggctggtagcagaagcgattcaaggtactggaaagatttgatgcactattgctgattcaaagatggagaggcccatatacaagaaccagagagtagtagctttgcattagttttctagggctgccataaaaaatgacagactggccaggtgtggtggctcacgcctgtaatcccagcactttgggaggctgaggcaggtggatcacttcaggtcaggagttcgagaccaacctggccaagatgatgaaaccctgtctctactaaaaatacaaaagttagccaagcaaggtggtgagtgcctgtaatcccagctactcaggaggctaaggcaggagaatcacttgaacccaagaggcagagtttgcagtgagccaagattatgccattgtacttcatacttcagcctgggtaacaagagtgaaactccaactaaaaaaaaaaaaaaaaaaaaaaaaaactgactgagtagctcaaacaacagaagtttattttctcacagttctgaaggccagaagtctgagatcatgatgtcagcagaggtagtttcttccaagatctctctccttggcttataggtcatcttctccctgtatctttacatgatctttcctatgtacatgcctgtgtctacgtttcctcttcttttaaagataccaattatattggatcaggtcctttcatatgacctcattttaccttatttcccttttcgaagattctctctctaaatacagtcatattctgagatactctgagttagaatttcaacatacaaattgtggtggaacacagctcaggtcataacaaatttctagctgctgagagaagttcctagccaacagcaggcaagataacggggctgtcaattctacaactgcaaggaactggactctatcccaacaagctgaataatctccgaggaggctctttctcatagcctccagataaatgtccaacttggctgataccttaattttggcacttgctggtcttctgaattatagaaatgtgagattttttttaaaagcctctaggtgagtagtaataatgtgttatgtagtgatagtaaactaatgcaaacaacatgtactagtggccagtcacaatttcttaaaaaccaaaccaaaacaaacaagaaagaacaaaacaagaaacctggccctaggatgctctgatcaaacaatctatagtctctaccaccgcagttgatcccaacatcttaattttcctcttcctgtcatccattctagatttctttatctttggacagacatctctttgtctaatcttcttgacaaaggattaaaaaggaaatccaaatacaaataaataggaacagaggacctgacacccataccacacctacctcagatgcactgacttctctccctttgctaagatttttatccactgtggagctggaaaggggcttggagattggacgtttctaagtgatctgatggaaaagaaaagatccagctctgggtggacatttcattacattgtcacctggtagtccatgctctggtgcaccatctctagcaggacccaacagcataaggagcttctttcaaaatgtgactagttctttgccaaagatggtatgactttgtttcaattcctagttctgtgctgtggttttttttgctatggttctccagagactagacataatgttttatctaccaaaaagacctccgacctcctgtactatgtgatctgcaagtcatttgtacaaagaggcagagctacttttaccataactaaaactgctgaagaatctaccttgctatgggccacactgaaaactgtcagccttctaagtcacttattacatggaacaaaagcaatattcccagtgtaatatgcattgtttccaaaatccaaagagaccaactgagattatcagcaccctgcttctcaccacctatgatggactgaagtacaaatgaagaggtaatgcattcattttgtaatagttctttacatgaattatatgggctaaattacactaataaagattgtaaaattaattagcagtttttggtagccacatacgctctgaaggaagaaaatagacactattaaataaggtggcagagtaaaagccaaaagccattctttgcagcatttcaagagactcacatttctttcatgtgcaaaatgtgttgaagagaaaaatgtgttgaaaatcaggttcaagattttaaaggaagagaggtagagccaaaaggagactaaattcatatttctgtcaaattctttatactgagttcagggccctattggggaggagtggaatattaagcctggatggagacattcgggaggatgaactaagaatttcaatccctatgagccagcagcaataaacaccctccctccatcatgacgaaaagagcatcttcccattgcttgaaactgtgcaaaggattcacccaagatcgatgacttctaagatgatgcttgtctttcttactttctacccctacttcccctaattgcctctgaaccaattacgtaggacaaatctctgcatgacttaatcaggaaaatcatgttcctactaggagaagaaagggaatgttcaacatagagtgataggcctgactaatatgtactgattataaccaggaaaacctgcctgggagtggatcttaagggtcttaactatggagaacagaatatgagcctggagaagagtgactatattcatataggtactataggttggtgcaaaaataattgcggttttggactgtgaatttcaaattattataactagactcaaacacatctttataaatcaaaataggaaccattatgatcagcacatttttgccaagaaataagtctgtttattcctataacataaaaatcagtgcttcaggatttgaagtcttggaaagcattttctgcatcctgttcattgtggaaatgttttccctgcaaaaagttgtcaagatgcttgaaaaagtgtcagtcagtcggcgagaagtcaggtgaatacggcagaagaggcaaaacttcgtagcccaatttgttcaacttttgaagggttggttgtgcaacgtgtagtcaggcattgttgtggagaattgggccctttctgttgaccaatgctggctgcaggagctgtagtttgtggtgcatcccgttgatttgctgagcatacttctcagatgttatggtttcactatgattcagaaagctgtagaggatcagactggcagcagatcaacaaacagggaccatgaccttcgtttggtataagtttggctttgggaagtgctttggagctttttctcagtttaaccactgagctggtgtagctaattgtcatataaaatccacttttcatggcatgtcacaatctgattgagaaatggttcattgttgttgagtagaataagagaagagggtgcttcaaaataacttttttttattttttatttttgctcagctcatgagggacccacttattgtgctttctcacctttccaatttgcttcaaatgccgaatgactatggaatggttcactatgagttctttggcaactctcagctggttactgtcaacttccgatggccggccaccatgctccttatcttcaaggctctcctctcctatgcaaaacttcttgaaccaccactgcattgtatattcgttagcagttcctgggccaaatgcattaatgttgcaagttgtctctactgctttaagacccattttgaactcaaataggaaaatctcttgaatttgctttttgtctgacatcatttccatagtttaattaatataaaataaacagcaagaaataagtcattcacaaaacaaaaactaaagccagaaatgcacattaaaatgatatataacataaccacatttatttaagaatgtattccaatatcaaatggcaaatttcaagaatacaaaaaccacaattatgtttgcaccaacctaataccttagcatgtttgggctgctacaacagagtacaagagactgggtaatttataaataatagggatttattgctcacagttctggaggctaggaagttcaagatcaaggtgtcagaagattcagtgaaatgaattttctggtgaaagctccctgcttcatggagggagtgtgtcctcacatggcacaaggagcaaacaggcttcctcacaccttttaaaataagggcactaatctcacatatgagggctcctaatatgatcctaattacctcccaaaggccccctcttaataccattaccctgggggattagattttaacacaggaattttggtaggacatgaatattcagaccatagaggctgcaatcaagaaaacaaaaaacacttatccattgtatctacagaaatttatctcatgtgtatatgtgtgtgtgtgtattttctcagaatctgcaagtccacctttctaaatgattataaatcttttgaggcccaggacacaattgtgggtaacttggagcttacgctctacaatttcaataaatatgtgctaaataaatgatgtaggaatgatataggaagaaagcagtacaccactggaaattactatgataaccatgtaaatgattctgatttgtaccagttatgcctgaaagtagatgttttgcattatgagctagttctaaaagactctcagatgattcttaaaaggatgattgcacttaatttcacttatagttttgattggtgatgacaaagttttcattaaagttgtaaatttccactcattgcaggaatgtcagatgatcaaaaagagtgggtaccaactgagctatatacaagcaaagtgtcactgtttgttaaaaaaaaaaaaagaaaaaagaaaaatatttcttgattctagagaataattgacagctcggaaaaaatccactcggccagttagctttcctcattctgcaaacattaaatagcatatttttattacaaacttgacagccaggccttaagaataagctctgaaatgcctgcgattacatgtgtaggcagggactgctatgactggctgggtttcagatttgagtgtttgtttagacagagcaagaccaaaaggtgttagatcagacctaatctccaccagacagctcggaggggggctacagatttcttcatttggtttcaccattgagtctacgtcccgtggaagccatgttattcaccttcacagacctcccacccatgaaaatagggacagccattccaagaaaacaagaactagaattgccacccatggaataaagcacatttagtgatggttgggagcagcactgtttttctaaattaacaagcagaaggaagcaaagcgtgctactttcttggcttggcttatttctcacttatttatacacctgaatctccactgaaacaacacactattagctgaacagaatcaccctttagccagtgagagaaattagaaaacacacttcattgtaagaggttttatttatttattacaacatggccagaggataagtataaacataacacaaactgttaattttaattttaattttaaaacatgttagagatttcatgtgatctgaattctttctcggtcacttccgtcttggtccctaccaccaaccttgcccttactcccagcccttcaagcagcttcttaagggaaattgacaagagaaaaacatatttttgaataggctaaatttgaagtgttcattaaaacaagtagctgattgtaggcttccacatctcttgaaatgttttatggccggtgtatgtcatttaaaaaaccttcctttttccaaaaaaaaaaaaaagaaagaaaagaaaattataggatcaaattaaacgctcccatttctgctgtagagcttgtgatgtcgtcaagatccatttcatttttatgcccctataacctagttaaagtacattttctctgtctctcctctccgagtctgtttatacctgactccagaattatttctatcagggagatacaaggtcattttttatactattaaaataaacagttctccagttttatacaagacctctttcaaatatagaacttacgggttctctctgtcagataatttaaatgaatgtttgagacctttggctggctttttcttttatcattcaaatattgaaattctcaaaataccgctctgattttaaataaggagggacctcaccctctttaattaggagtgacataatcggcactgtcatagatgatagaaaaatgaattaaaattttttaaagccaataaactaaaacattttattaggtttaatataaatctgatagatttaatttttattcttaagcctttgaaatagtataaaaacaaattttagctaccacaatggattcattttgttaatacctctttgccatgaaccaaagtcagacatagttgattagaaatgaagacattttcatagatctttggtctttcaagtttcttagtagcagtacctcaatattttaaaggagaattctccacattaacttaaaaaatacttaaggcaatttttgaattaattttattttttctacaaataaagttagtttttaaaataaaaacaagaaaattcattaattttgtaattttcctgtacaaatttagaaataatctctcataaataagataattgactaaaaatttattttctaaattctacagtgttacagctatcatttgaatgtctgtgtcccttccaaaattcataatgagacttaatctcctaatgcagtagtactaagttatgggtcatttagaaggtggttaggccatgagggctctgcacgcatatatggataggtttagtgcctatgaaagggctggagagagctagctagcccctttttgtactcttattcttccatcgcttctgccatgtgaggacatattatctggcccttctgcttacttccaccacatgagaataagcaagaggtgccatattggaagcagaaagtgggcctcattcagacactaaacttactgacatcttttttttttttttttttttttttttttgttgaaccagtcacttgagcctggcttgagtgcactgtactctgtcgctcaggctggagtgcagtgacactatctcagctcactgcaacctccgtcccctgggttcaagcaattctcccatctcagtctcccaagtagctgggactacaggcatgtgtcaccactcccggtggatttttttgtatttttagtagagatggggtttcaccatgttgggcaggctggtctcgaactcctgacctcaggtgatctgcctgcctctgcctcccaaagtgctaggattgcaggtgtgagtcactgtgccaggcccctgctgacatcttgatcttgggccttcagcttcaaaaactgtgagaaataaatttctgttttttataaattactctgtctaaggtattttgttatcggagcagaaatagactaagataattattgtaggaaattaggtgccctcattatacaatgacataaaatggttgaggaactaattttatgttcaatgataatttttttattaattgaacttattgaatttttttcccatttaggtaaaactataccatttaaaaattctttttatgtctgtcatagaaacaaatagaagggttcatttactctaaatgggaagtcaataaagaaagaatttcacttctggaagtgtgccagttagagaaaatttgggactagccagtttaacaaagagtctggactatcctttgtcctttgctgtgcaaagtttcgtgcgggaaacatacattcagtagcatagtctaagacatccaaaagtataacgagaactttgaaagtataaaataatgaagttgacaaaggggagcagataattttttcgtcatgaacaactatgccaggagccaagatactaatgccagaagccccagggaatgcctaggcatttgaacatcatgcctaattgagcacttttccccttggatcacatacattaagattaagttactagagagataggacctcctaacattttataacgatggtgacaatagcattcctgtagctccatgttctgagagtagaaatgtttttaaaattgttaatcaagccattcttttggtttataagaattcaaattaatgctaaaatagctaaatcatagtggattttaggaaatggttttaatcactgccaaaagaaactctggagattatagggaagaaggatttcatgttaaatgtcaactcattgaaatcctgcaatttaaatgagtcatttctacaccttgcactgagaatgtctttctccctttcatttaggattacctaactagtctatttttactcaaaattcttattaagttttttctgagaaatctccaaactgctttccacagtagctgaactaatccaaactgctttccacagtagctgaactaatttgcattcccaccaatagcatacacgtgtttccttttttccatagccttgccagcatctattatttttaaacttaataataaccattctgagtggtgtgagatggtatctcattgcagttcttttttttttttgagatggagtctttctctgttgcccaggctgggtgcagtggtgtgatctcggctcaccacaaactccgtctcccaggttcaagtgattctcctgcctcagcctcccgagtaactgggactacaggcacacaccaccatgcccggctaatttttgtatttttagtagagacggggtttcactatgttggccaagctggtctcaaacttctaacctcatgacccgcccccgttggctcattgtagttttaatccagcaatccaactactgagtatatactcggagggaaataattcattctatcaaaaagactcatatacattcatcacagagctattcacaatagcaaacacatggaatcaatgtaggtgcccgtcagtgttggattggatcaagaaaatgtggggcatatacaccctggaataccacacagccataaacatcaatgaaatcttgtcctttgcagcaatatggatgcgggtagaggccattaaattaagtgaattaatgcaaaaccagaaaagcaaatactgtatgttctcacttacaagtaggggctaagtattaaaaacacatagacataaagatgggaacagtagacactgggaattactagaggggggaggagagagggaggaatggactgaaaaactacctattgagtactatgctcaccatctgggtgaggtgacagaaccattcgtatcccaaacctcatcatcatgtaatataaacacaaccttgcacatgtacccctgaatccgaaacaaaaaaaattacaatgtgtaagatgaaaagaattctctttttttttttttttgacctggagtctgattctgtcacccaggctggaggacagtgacgccatcttggctcactgcaaccttcacctcctgggttcaagcgaatcctcctgagtagctgggactataggtgcccgccaccatgcccggctaatttttgtatttttagtagagacggggtttcaccatgttggccaggctggtctgcaactcctgacctcaggtgatctgcctgtcttggcctcccaaagtgctgggattacgggagtgagccaccacacatgggcaaattcttacagattttttttttaatccaaaagaaagaaattaatttctaagattaagtaaatttgagaaggttggtacacgttcatcagctgattaaaatttaaccataacatgttcacttaagagtctctaaaatgagatactggatttacccgggaattagtttgccccactattagtcttatttgtacttctctctggcctgaccttggttgtctttgcattggtggagcctgggttgagtgattacagagggtgtgaagaaggggctactttctcagcactccacgtcactacaacctttcagatgcacacgtcccttttgacctaagtagctttcctcaggacaaggggtcagaagagtgacagacttttaacccgaatatacccaggaggtctacatagtgtccttttcattacagtattcaggccagtatattttctgcttgtttgttcattgttcgtttattttaaacagagtgttttcctgcaggtagtaaggaaaatatattttccaacttcattaaaatcaatacttactggttcaccacttagttgcaatgtcttaactcttacaacttagcggtgagttcttaatggatttaggcatgacgtcactaaccaagttctagtgtctagactatttacagtgtagtttctatttattagctttctttcctggactacataattgagtcaccaaatgatttttatacatggcatcacgttaggtatgataaccccatatttgtgatgaggtggggaaatcttgttaatacctttcatcagaattccttttataaaaagctagtgtatttgctcagggaaaaatacaaagaaaataactacagtcccttgacaagtgattgagagtggaagatgagatcttcagggacctggaagtgggtggaaatgttctaagtgagatgttaaagtaatatacctgtcaatctagaaaaaggagtgaggaagagggttgtggagctaggtagatggtagagagctgtatggaatttaaaataactccacccatcgtctgctgtatgttgagtgaagttaccaaactgagaaatgcatgtcattagtagatgtgagtgtttaagagtgatgtgtgtttgaaggtgtgtatatgaaccagtgacggggctgggtacatatctgtactcgtggagggcaaaagtccacacagacaggaaaacacacagtcagaagaaagcctgaggacctgtctcagcagctcccagagactgtgaggagggctctgtatagtcacagcctgaaattgtgtttcaggtcaggtttaaccagatctccaaggatcagaaggattcaagataatgtatgtgtcccttggggcagataaatatatgaaaaatggtttctaggaaagaacaggatggggagtcaactgttggttctggcttttctcctgattaaggagaaggaactccatttaaactataaaatgagggtgggaggagagaggatcagaaaaaattactagtgggtactaggcttactacctgggtgacaaaataatctgcaacaaacctttgtgacatgagttattgatagaaaaaactggcacatgtactcctgaacataaaagtttaaaaaaaaaaaacaactataaaacgagaagcgttttgggactagattaagccaaaatattcttcccctactctggaaccaggaagatattctctgtattatctcctattagcaatataattttctcttttatatgtcgatatttattccatctgaattttccttttggatgtggtgtgagaaagggactcaaatttatttttttcttataatgaactgcttttgttaatatcatttaaaactactccatcttttcccttatgggttgtgatgccaactctatgctttctgtctgaccacatattagttgaaattttattccctatgaatcttctcatgatttctttgtagatttatagctattatttctttctcctttaaaaaattagtaggagggaagtctcaggatatttaaatggtgatgcatgtgactaatatacgatcattgaacttttccaatgacattgcaattctctaaatattaaatcctctaaatgttaaaattaaactcagacctataatgcctgagtagggggcacccacgtaactgagtcagttatatgtgtgtattaatgcatcactttaagaaacatttattgagtgcctgtgatatgccaggcactggctgtctaagaatatggaaatgaataggactgatggttgtcatttgcatcgctattggtttattgtctatcaaacagctttgccatgtaaggctctatgctaagcaatcattttcattagatattagctgggtctggaacaaaagaaataaaatgaaataatgtacctagagatgtcagatattatgggatcaccagagtttttcaattgaaggattacattaacttgtgacaacctacaacttgtaagatatgaattttgctatctgctaagtaagctaaccactaagctgtcatactctaaagagaaaatcagcactcatacctataaagtatatgagaatttattgttgaggaaatattttatttcttatgttttgctaaaacatatgaaataattttaatttttaattactaatttttaataagacaacaaatgtctcatttataggttagtccctttggctatctacccaaagcaaaatcaagaactgttgattaaataaaaagcaatacttcagaactaaaataaatgtcacaggccatacactaaaattcattgacttcagccataatagacctcgtgaatccttgctttgtttgtatatatttttacttctgtaacacattctataaatgtagtcatctaaatgtccagctcaccacagattagaagcataaaatagaagtgtaaagttataaaaacagcatcagtaactagaggaagataaccaataataggagagagttataccggacagcatgaaaggtgactgggaatgcagaattcaaaacacaaaagagcatggtaaagtataatcatgcatttaacattatagctaatgatccctggccccttttctataataatggttgttgatgatagtgcccttcatgcttaaaaaatgtaaatttaggataagtatctctggttaaaaagacagatatggcctggcgcagtggctcatgcctataatcccagcactttgggaggctgaggcgggcagatcacgaggtcaggagatggagaacatcctggctaacacggtgaaaccctgtctctactaaaaatacaaaaaaaaaaaaaaaaaaaatagcagggcatgatggcaggcacctgtagtccaagctactagggaggctgaggaaggagaatggcgtgaacccgggaggcggagcttgcagtgagccgagatggcgccactgcactccagcctgggagacagatcaagactccatctcaaaaacaacaacaacaacaacaagaacgacagatacatttgttttgtgttttggaatgatttattccaaaaaaatttagttttgaagggaagagttttgtatacattatatgatacatataccatatgtataacataagtaatagatttatatataatgcatataacatatatgttatatataatatatatttttacatatattcaggttcatctcattgaacctgccatcgtcaggcattgtgatggattttcaaaaaggttatttcattaattttgatatgtacagggtagagtatatgttattgtttatacgcttacagataaaactgtttcagtaattcacttcaaatcacaccaccagatagtgactgaactgcaattggaatcagttccaattaccaattaattaattttattggtaattaccaattaccgataaaaatggccatttttattgtaagcgatgcagtctagaacattggctaggactgctttcaagtcagaggaccttgattttgaatctcaagtttggcattacctatttggccataagaaatgacttagacttgtgcacatgtaccctaaaacttaaagtataataataaaaaaaaaaaagaaagaaagaaatgacttagactttctgtgacagagcttcctcacctgtaaaataggaatggtaatacccaatttaaatagtcatgaagatttgatgagataaagtatgtaagtaaacactttgcataatgattagcactttgtaatcactcgacaaaggaaaatattccatgactcttaattggagaaacttctatcattagagaatgcaagatttaaagatagcttagtctctcagaattcagaataaattaagtcatatttcgattataattaatctacagcaagtagtaaatactcatcttgttgtaatagttggccattgaataaacttaagacgtttttctgagtcatctgttttctcaatctttaacagtgtaatccttttatctctaaactcaggaaaccattcttcaaagtcttactatttattgtcagagaaagcatatgtttgttaagagatcagtataaagctatcccagctaattgagaggaaaaaaatcaagtcatatatcataagtggcattatgtaaataacatcttataggctaattagaaataattagtttttaaatattggagttcacattaaatttatattttttttgttaaataatagatgcctacaagtcaaactgactttctaacaattaatataaaaatagatttccaatattcttcctttattgttccatgctgttttccattctctagaaagaacctagagtgatctcttaaagtacatgatagttcatttgtctttctatttaaaaccctctgatggcttcccattacatgtaaaataaggcctcatcttcttaagggcccacaaggtactatatgatctggttcttgtctctgaattcttcttccttccatcctcttccttgcttactctgtagctaacaaagcatgttcttaacaatccttgaacatgtccagctcatttaaaactccacatcttttaccatgagtgatatgatttggctgtgtcctcacccaaatctcatcttgaattgcagttcccataagctgcacgtttctggaaggacccggtgggaggtgattgaatcatgggggctgttaccctcatgctattcttgtgatagtaggtgagttctcgtgaaatctgatagttttacaaaggacttttctccccttcactctgtacttctccttgctgctgccatgtgaagaagggtgtttacttccccttccaccatgagtgtaagtttcctgaggcttcccaagcatgctgaactgtgagtcaattaaacctctttcctttataaattactcagtcttgggtatctattagtagcatgagaatggactaatacaatgagtgcttttccttacattgccagcttctcattcagctcattatttccttttctactcaaatgtctcatgatccttcaggggacttgcctgacaccttctctttcaccattctgtgtgtgtaaaaatacatacaaggggccgggaacagtggctcacacctgtaatcccagcacgttgggaggcttgggtgggtggatcacgtggtgaggactttgagaccagcctggccaacatagtgaaaccccatctctactaaaaataccaaaaattacctgggtgtggtggtgggtacctgtaatcccagctacttgggaggctgaggcaggagaatcacttgaactcgggaggcagaggttgcagtgagccgagatcatgccactgcactccaggccaggtgacagtacaagactctgtctaaaaaaaaaaaaaaaaaatacacacaaggatatttcaacgagtgttgagtatgataaacttagcagcttttatctcccatttctgcccaaaattattttctgtagtacttcccttcaccatctgttgatggcatcttaggtataacctataacttttggtcaattccaggtgtcagttctataattaccatccttgacttcattttatctgttctgttcttttggcattcctattgagctacagaatacattgttatagatatatagaatacatagccacagatacatagactttcagtatctactattcatagtatttttaaaccatcagtccttgcttcatctagaaccattattttattcatcctatccataaattttttccaacatacatctatatttatatctatacctaatctatgcatttgtttaaattcaacatggtgtgtgtgtgtgtgtgtgtgtgtctgtgtgtgtgtgtgaatatatcttcattatccctaatggatccttttttatggcaatttgcttttgtttcataaattcaacattagcttaattaatttcacttgttttaaagtcttcttctgagtgctttagtattatttccttgtgtgtgagtactttggtttgttatttgtttatgtggtcttcatgcttctcagataatttggaatcattgaccttgagcttatctttgcgttcacaattccttaacaactgcttactgctgtttactgcagagttcaccaaagtgagtgagaaaaaaattacttctagagctcttgttcctcactttttcagtaagatgagaaattgttggaacaatagctttacatctggtcttctttatcttctctcagctttgcctggtttagacctttcactgggtggtccttgtcagttacctctctctcaccccagcttccaccacctcaagatatagagatttttgagataatcccactttatttggcattgttttccacaggcttgatcacctgccatttttctctttgaatctcatcttcttcaacattacattatgagtatagggttaagaagctatatagtggccaggtgcggtggctcacgcctgtaatcccagcactttgggaggccgaggcgggcagatcacgaggtcaggagatcaagaccatcctggttaacacggtgaaaccctgtctctactaaaaatacaaaaaattagccgggcgtggtggcgggcgcctgtagtcccagctactcgggaggctgaggcaggagaatggcgtgaacccgggaggcggagcttgcagtgagccgagattgcgccactgcactccagcctgggcgacagagcgagactccgtctcaaaaaaaaaaaaaaaaaaaaaacagaagcaatatagtgtaaagaatccaagtttattttgggatagataaggaatataaaatacttaataattagagaatatagccagagctataaagatatctgagctaaaaataacatttctttgtttctttctttagactgagaaaacgtggtccttttgtcggtaaaagagtttggtataacaacatcaatgcatgcgggaattgttcctttctgcctaaagtacagttttgggtaagttattcagtgtttactggatgtctactctggttagaatattgtcatagtagaagaaaaaaaatctcttattagaaatcaacttagagcctaagaacattggatctttaaacaattggtttaagcaagttctttaggagaaaaacagtgtctttcatctacaaatgttaatttcaattccacctttatatgatctgagggaacagataatggcaacattaaaagagaatgttctttaggttttacttaagcaaatgctgatagaaaagatttaagtaaataggaaatgacttgaccattagcatgattgtattttaaatagccgttagttttagagagcactcaccaataaatagcaaaacgtacccctgtaatttataaattctctgtctttcctctggtgaagtataaaactcacttttgttcccttatttcagtgctttacagagttaataaaataatgaccttccccacccttcattttaagatcataactagtgtagaagtttccattgaaattgttagatttttcttttttttcagttcactggatatgatctttggcctggttttgatgttactcatttgtttttggatcaacttttaccatgtggctgagattttttgtgttgttgtaataatactaagttacatcactgctcttctgaaaagtagaactgaatgaaaattaaaccttaaaaaacactatgtttgagcaatgttaaacatctgccttgaacttacaagggcagggcagggcagggcacagctttttttttgtaacttaagtcctgagttgatctggtttttaaataactatcagctctaaaatacaagtgtccgggcatgtaaatgcaattaattttattttagtttatagctagaatttttaaaaagttaaatctcttaagagaatttttaacttcttagaggaacatattagggcttagcatgatgtttaattgtcctgtttaaatattctgtctttagtcagcctttgggcaaattacatgttatcattttcccagacaatacttaactcaatcatttgcactcttatttaaaaatgtgaatgaattactgacatatcattgacaccttgcttttatatgggaaatttgactgaaaatgtaggtgttgccatgaaacgggcattattgtggcaaaaatgaagttttcccataaacttaagaccctcttcaccttattttctccacctcccaaggagtgaaaagttgttagttttgctatcactatataaattttaatcagggcctgtttgttagtattaaatggaattcacatcaaatataaactggtcttttggtttaatagttaagagtttatttttactatttagtttaatagttaatttttttctttacattgaaacaaaacatcatttccaagttgaaagtatatagaaagagacatgtggtttacctaaaacaaaaactctttttttttttttttttttttgagacagggtctcactctgccactcaggctggagtgcagtggtgcaatcacaactcactgcagcctcaacttcccaggctcaagggatgctcccatctcagcctcccaggtagctgggactactggaacacactaccatgcccagctacttttcaatttttttgtagagacaggttctccctatgttacccaggcttacttttttaagaatcttttattgaatgtctactatgtaaaatataatatggaactaatgggggaaagttaaaaaaaaatactgtgtattagagaatcttgaaatcaagggaaattttaaattgacaatactgattactttttggcaaaaatgtcaaagttttatggtcttacaaaaagatatgattgactaggaggccaaagtagtcagtggaaatagcaatgagttttgaaaccaacaacaaaagaaaatgaccagtgaaagtaaccaagccaaaaaaaattgaagttaaagtagttttctcatggtgcacacccatgaaatagctttgtcatgattttatattggcaagtgtttcatcaagatcataatgaggtaagaggatagacactgcttgagaactgcactgatattatcagccattttcccttttaaatagtctagttttggaaagtaatattagaaaacttataaatcctcagtttaatattttagtaaatatttgtcaattacagaattttagaaaatgacttgaaaggatttatttttgtttacaaattactccttttcaaataacaaaattgagacagtgaaatgctttgcattatatttccatgacagctccatgagatagataggcaagtttatcatccatattttacagttggaaaaactgaaacaggtaagttaagcaacatgaccaagatggcacaactcgggagggtgaagtagggaaaagaacagcacaacctctctgagacaatcctctgtaccatgtctatactgcgtaccagtgcctgagttcatcgcaggaggaagacgtgggcaagtagggcagttgatctgttgggggaaggaggaagaaagggattgtttgtttgatctaggggcaaactaatgtaaattggcataagatcatggagggagtggaatgcttatggtaaaaattttgaatctaattttgtaggcaaggaaaaggcaggcttaggctatctctgagccgacagaatagctttattctaggtttggaactaggtgtctggtagttgagaataaattaatattggtcaatagaggctttatccagaaataagcaattatttctttattgaataattctacaaacagtcgtcagatttactttgtaaaatcatatgtccttgaaggctatacatgaattgatttttatttgaaattgttaaagagaatatgcctacttgaaaaagcttatcagctgccattttttgttccaaaataacaaattaaaaatttacattgaagttttgtcttgtttgcaaacctctcagctagggttctacgcaaaataaatagaaaggaacaagttactgaagccttcactaaacagtaattgaaaaatatttatggcatttgaaagatgttttaaaatgtattttgtagctcaaagtgccataaattagaaatatgaaaataaagaaaatagaatggtatgtagaaagtaaagagcataagcttttatttttaatttattttattttaatttattttattttatttttttgagatggagtctcactctgtcacataggctggagtacagtggcgtgatctcggctcattgcaacctccgcctcagcctcccaagtagctgggactacaggtgcgtgccaccatgcgtggctaatttttttttttttttgtagttttagtaaagacagacagggtttcactgtattagccaggatggtctctatctcctgacctcgtgatcctcctgcctcgacctccgaaagtgctgggattataggcatgagccaccgcacccggccagcttttattttctgtatttacgtttctctttaaacaataaattcattaccctttgttacttggaaggctatatattttatatttccagtgaaataaataattacatttaatatcaaataacaatttttctccaaaaagatttaaatctagcttaccacctaaatttaatataaaggaacttataaacacagtttgatcaaatcatagctagaaaactagggaaataatggaggaattctaaaatctctagtgttaatatgcttgtattcatgatttcaagtacttatatgaatgtttgaatgagaaaacttatgcaattgccccaattccacgtactaatgtcaagttatttttaatattttgcttacatttgtttaaattgttaaatatttgaaaatgaaaatattttattatattataaagatagtatgcaattatgaacaatattcaagtaatgtgaaaaagtataacatataagattaattaatgaaatcttcatactcatagataagcactcagttttttgatgaacaatttccgacatctttttctgcataaagagaaataagcatataaacatgttatataaataatatcactctattttttaaactacattttcattcaacattgttataaatatcaattaaagtattttcatataaaatgttttgccttcacaatatattatttcaataatcttatattgatagatatcattgcattttcataattttgataatataaacaatgatgcaattaatatatttaacttacctttgttgtgccagttcaattatctgttaagaaaaatacccaaaatgaaattgctggatcaaataatatatacatttttaatttgaatcacaatatatttaacatttataaatgttcaaaaaactcacataaaaagtaacaagttttttgtttgtttttttgttttattattatactttaagttttagggtacatgtgcacaacgtgcaggtttgttacatatgtatacatgtgccatgttggtgtgctgcacccattaactcgtcatttagcattaggtatatctcctaatgctatccctcccctctccacccaccccacaacagtccccggtgtgtgatgttccccttcctgtgtccatgtgttctcattgttcaattcccacctatgagcgagaacatatggtgtttggttttttgtccttgcgatagtttgctgagaatgatggtttccagcttcatccatgtccctacaaaggacatgaattcatcattttttatggctgcatagtattccatggtgtatatgtgccacattttcttaatccagtctatcattattggacatttgggttggttccaagtctttgctattgtgaatagtgccgcaatgaacatacgtgtgcatgtgtctttacagcagcatgatttataatcctttgagtatatacccagtaatgggatggctgggtcaaatggtatttctagttctagatccctgaggaatcaccacaccgacttccacaatggttgaactagtttacagtcccaccaatggtgtaaaagtgttcctatttctccacatcctctccagcacctgttgtttcctgactttttaatgattgccattctaactggtgtgagatggtatctcattgtggttttgatttgcatttctctgatggccagtgatgatgagcattttttcatgtgtcttttggctgcataaatgtcttcttttgagaagtgtctgttcatatcctttgcccactttttgatggggttgtttgattttttcttgtaaatttgtttgacttcattgtagattctggatattagccctttgtctgataagtaggttgcgaaaattttctcccattctgtagattgcctgttcactctaatggtggtttcttttgctgtgcagaagctctttagtttaattagatcccatttgtcaattttggcttttgttgctatggcttttggtgttttagacatgaagtccttgcccatgcctatgtcctgaatggtattgcctaggttttcttctagggtttttatgattttaggtctaacatgtaagtctttaatccatcaaaaagtaacaagttttaaaaactgttcttttccagttttgcaatgtgaaatataattaagttaaattatcctaacaaggacttggaagtggggtctttgaaattaatgaataattctatatttattcctagaaattaactttgggcaagtatactttatacattctccttattatttttcttattgcttattttttcattataattcaagtaataaagacctagataattttataattatgtatctatgtggtttcattttttaaatgacatttaaaaattaagaaacttcacagaatgcttaacatttgacaaatatgtttcaaaaatgaaaacaatcttgagtattcttctaggtcatttttccacagatacatttcataatactgtactaaaatcaaatttaatttgttagatttcagtgttttagggtcttactttgcagctgcaaatggtaacctctcagctgctttgacgaattcatgggagttggcctgccaaatggtctgataaatcactgttcagtctggataaaagcaaggactaaaatgttcatttgtaaggatcctgcaaaacaactgaaaccaacttgattcttgattcttaccaatatctcatttgtccacttcttttcaattaactccctgctcagacatgtatacccaattacaatttggtaaaggaaaggagcattattatctgtagcttcacacattgtatactaaacaagattcaccattcattcagtaggtgagtatccttgaaggctttattttaccttgccttagtttcctcattcacagaaggcagatcagagctacttcctaataatagttagcatttacttacttaccaatttactgtttggatttgaggctaaacattttactatcattagttattgtcataaacacgatctccaaatagtacgcactctttaaagttaatgaagatgccagagtgcttttgtttatgtggatcatacctatatatagttaccatactagaaattagaacattatctatgtatttatttttgaaagtaattgtaataaacttattatatgttaagttacatattttcatgaacaatagtattattttaaaaataaaaataatggcacatttcatatttgcaattctctttcttgagtttcatagaactggaatctccaactgttgttgtatttagtttatcaatacattatttttattaacgtatgctaagaaaatccagcctcacacaattatgtggatacaaaagaaaccaatattttaattgtactttcggataattaattgtactttcggataattgtgaacattcttctttaatatttgacaaaaactaaataaatgataatttcataaagattagttgcagagcataatctgaaacggtatcagtgaacatttgatactctgttaccctataatattggtttatttttcgctttcaatgtatcatttattcatgcagattttggaacatcatgcattggtcatttggacaatattagttcactgaattaggcagatattctaaatgttgatacattttgttatataatattaaaaaaatcagtaatatcaccactaatcttacctgaaaagtctttaagtattgggaaggggtcaagctcacaataacagatacaaatataccaaagttctaatttttgtttgaaaacttaaatttgaatactgtctgtctgttgtttgcatttaagactcacttcatttctgagaaaatatctatctgccatatatcctagtttaagtaaccgtagtctatccatcagtcatcctttcaagtaatactagtgttcaaggaagaaaacagatggtttggctcataaatcaaacataaatttatattcctttagacaacaatgatataagaatatgcaaagcactttatatgtgtacttctcatttcttcatttaattacctaattactttgacacagaatatgagctgaataatatattttacatatgcatatattcagatttataatctttgatatttttgccttattacatactagtgatataaaatatgttaagagcagaatcttacacacttacattaattctaactctttacctttgtggcagtgggaatttacatttcgtaaacttcttgagtctcagttttgtcaactaggattattaactatataggtagatagacaggaaggtagttaaagataagatggcctgcatcatacagttagtgtgaggattaaatgaatgtatacaacactctcagcacagaaagcattcaatatatggtattaaaataacaagatcaagacttacttgcccagaggctgaacccgtgtctccttgttccatgttcaaggttcttttccatatgctcggacatcttctataacagttttctatgccaacaaaaacatacaaagatgattcgttatttcaggttacttaatgatcttctgtctaccaatgtgagttttccctcttctaaattgagtttggttttgagtgtaaaattagaccttccttcatcatttggatcatcatatcacatttcgcataggagagaaatgtactttcaaatgccttttaaagcataattgaaacttgttttgagtccatcaggcatgacacttgtctgttaaggtttttgcaaatagctcattcaagttatctacaacataatctctcaggtcagattcctttttttttttttttttttgtcttttttcccatcagatactcctgtagttattcttattgccttgaagtagttatatccctttaaactctctgatatccaaagttacttcaaattgtgtacagttagacatatatagacgttttagattgagtttttccataggatctcgttagggtagatgctttaatttttcattagtcatagtatagagaaatgtattttaatggctcctggtatttagcataatgaaattaaagtaataatgacaataacaactgcaacagtatccgtggcagcaacaacaacaacaacaaaaatctggccctaaatttgcctttttaatttttttctgtgacttctgtcctcacttagaacatgtacttaagattagaatgttgcatagaagaagccatgatcacatatgctgaattatattcatttccagtggattaatatgttgaagataggtaattgtaacaactattagttttgtcctttatcattacaagttagccatcaaaactttttcttaaaatgattaagattttaatttgccatttatagccaaggggagtagagtgaggaggaaaagcattttcctcagcacctcatctgttgaatcagtgtgacactgaacattgtctacaatgcatctccaaaaatccaagccaaaacaaacctaagttttctttttcttcttcactgtgtggccattgaaaaaagaaaaggatatgattgcctttgttctccccattttgtcttcttatggaggaaaattctgagtctatttcatgagctcatttttatgtatttaaaggaataataagattaagtatagacaaaggtatatgagtcaaccagttaatgtgggcttgaaatgggatggattttacaacagataaaattttaaagaaagacaaaaacatcttgcgctattgagtcagtgggcactttccaacatttcacactgatctttagtatttaatttctgtgtcatcaattttctttcaccacagcccttcccttttctgtttgcagtgtctgtcctttttttttttttttttttttttttgtctatgcagacatttgttctgtctgttttaatataattgtggctggagagaaatgaaaaatagtttgagtaagggtttcttttatataacaaaaattgttattgaatttctatgcatatgctttaacaataaatcttaacaacaaaagagaagaaaatgtgttttcttttctgtgaaccctttctttacaaagaaagatatttctaaaatttccagaatagttaaaatgttacatgataataatgggaacatttgttatttgactattctcatattagattgttcttttgatctaaaaatggttattgtggtgaaatttactattatagcttattaaaactacatgcttactgtgacaaaaaataaatagcatgcatgatgtgatgtttagataggcatatttttaaaagatgtcatttacaatgttatgtagaataaataaataataaagggaatgggataaaataagaaaaataagtacagaggtttgggagataaatgagatacaggttgtccagctcctcttttctactctcctttaccagaccaccctcctctaactaattttttaaatttttatcttaatatgaatgtcccttatttacagtcaaatatctaaataatgtaaaatacaccatataaaattaatctctgtccctctgcagacttcctcatgtatcccactcagtcttacattaatcaaagaattgaaatgaagccttctgtgtctcactccatactttcacccaattatccatgctcatgaattatgagcatgaattattaataataattatgaatcattaagaaaatttccaaatttctatgtcaagctcacgtaatctaattttatgctataattgtccatttggatagctaaaagacaccacaaaaccgtaagtccataattgaactcatgatcttcactcccaaacctagacccctccatggcaggattccctctctccataaaacatatcacacaggactaactgccagacattatgtctaatacgactttctctcccttacccctgtatccagtcaattaccagctctatcgactttatcttctaaatttatctctaattcttatgctactctccatctgtggtgtcattagcatcatgttcactcaagctattctcatctgatattggtttcccaaaatgtctacccacctttctgtgatctctctttaatccatgctacacctaacagcttgagggatcctaaaatttgaatctgaggatgtcatttttttgcatacaaatttttattgttgtattagtcaaggttctctaaggaaatagaaacaataggatggatctatatttaaccatctatatctacctacctacctacctagaaaaaagatatatatacaataaataatacataaatctattaaatatataaattaaatacatttatttaacatataaatacatattatttttaaatatttaatattttaattaacttaataaaatttaattttaatatttaatatataaaatatttaatatataaatataaatttatgtatatcttatatagaaaatattttagtcaaatatctaaataatgtaaaatgtaccatataaaatgaatctctgtccctttgcagacttccccatgcatcccacccagtcttacattaatcaaaaattaaaatgaagccttcatatatatacacactatatatatacacaagatatatatatacaagatctatctatctatctatctatctatctatatatatatatatatatacacaccacacaagatctatatatacatatatatacaagatacatatatatatatatatatgtcttgtagtctgccattaacctggagaaccaggaaaactggaagtgtaattcagtctgagtccaaaggcctgagaatgaggggagccaatgtccaggggcgggagaagatggatgtcccagttcaataaagagggagcaaatgttccctccctccacctttttgttctgtttgggcacttagattggatggtgcccacccacattggttaaagtgatcttctgtacccagtctactgattcaaaggggaatcttctctgaaataccctgagagtcacatccaggaataatgttttactggctatctaggtatctcttagcccagtcaaattagtacataaaattaaccatcacaattcctcttagcatgaatacaaaaatgtttcaaacaacttaaaaagatgcaagatctggtgtatttataattcttcaaccttgtttgcacaactctccacaaactgaaatgtgtttgtctgttttgagacaggatctccctctgtcactcaggctggagtgcaggctggtgtggcacgatcatggctcacagtagtttcgccttccagactcaagtgattcttccacctcagcttcctgagtagctgggactacagatgagtgccaccaagctcagagaattttttaatttttttgtagagatgaagtctcactatattgcccagactggtcttgaataaaatcttttaaaatctcttaagaaataggtgagtttatgttaagtgcttagaatagtgtaaaatacttagtatcatataaatattagttattattatttagtttttcttgtaactgtttctttaacaatgagcagagtacctgggacatagtagatgaataacaaattttaatttatactactaataaaggaggattggtctatgattacaatagtaaaaaaaaaaattaaagaaaggatggataaaatttttacttgaaaaaatctggaaagactttgtgaatgaaatgtatgaatcacaaagaagggttttaagagttcttgaatagaaagtttggcattggtctttgactgagatgatacattcacctggcatggtggctcacacctgtaaccccagcactttgggaggccaaggtgggcggatcacctgaggtcaggagtttgagaccagcctggccaacaaggcgaaaccccgtctcaactaaaactgcaaaaattagcctggtgtggtggcgcacacctgtagtcccagcaggcaggagaatcacttgaacctgaaaagaggaggttgcagtgagccaagatggcgccactgtgctccagcatgggtgacagagaaactctccaaagaaaaaaagaaaaagaaaaaaaaaaagatgatacatttagagggtaactttggtgtaggggaaaatagcagagatgagcttgatttggaacttgatgattctgaaatgatgatgaggattccaaatggaaatgcatggctggcttctgaagctgtgggatgtgaggtggtgagagaaaactcaagattggtggtcgagagcatagaggttgaattgaagtcataggaatttgtgctgaggtagaaatgcctaagtgactgcagagacccttgcctcctttgttaaatggtaatagaatgggagctgggcacatggaggcgtagcgagactccattttctagcctttcttcagtttaccattctactggcaaaactttttcatgtggcctttccatgtcctctcttctatcctgctgacagttctggctgtcagtccagcctaggccctacatcaaagccctggggattgcagagctacgaaataaaacgaacatagattcatggttaaggtaccacctgaaaatcttccatgcttctcatggacttctgcataagaaagataaataaatcctatcatttttttaagttactaaatgtggaatctgtttgttagtagatttgtctttcctattaaccaatgggaagtatgtatttttaaaaatgtgtttcctggccctaaggtttactggtgctgtgacctgagataagtgacataatgtctttgaatatatttcctgtaaattggagcagtgataactgtcagggttgtttagagataacatgtgcattactgaaacctgtgcctggcctagaatagatgagctctaaattgtagcagttattattattgttatcctcccatttctatattttctcttgcttcttgaaggaaatgtaaactatatacgtggtgacatgtgctaatgataaacttgcacacaagtctttttgatcattacatggcttgccatttacattttgtcttagtctgttcaggctgctgtaacagaatgccacagactaggtggcttataaacaacataaatgtatttctgacagttctggaagcagggaagtctaagatcaagatgctggcagatttggtgtttggtgagaatccattttttggttcatagctttctagctgtgtcctcaaatggcagaaagggcaacaaaggcaactctggggtttcttttatgagggcactaatctcattcatgaagtctccgcctcctaatactatcacattgggtattaagtatcaacacgtgaattttggggagacacaagcattctgcatatatatcacttttcagtcaatgtttgccaaagaagcaggatatttaggagaaaaaaatatttatgtaatatggaaagttggttttcctcctgaattcaatatcgtcattatcacattttacactagacatgagcttttacttaaaaacattaatatattacatgttacatttagaatgtattttagctaatatattagaaaaaatacatactataaacaagtagcttgcctttgcaaactaatgaagttgaaattcagcatagtccattttcttgtggttatgtttttatcacaataacttaattttcacatgtataaattgcattgtgaataatcatttttatgtaactgcaataaaaatgggtagcagtaattaattgtttatgacttgaacttaatgtattttatattaaattgtatttgggaaattattgaggaagtttcttaattcatcctttagttaaatgaagggcatattttattttaatatatttgaagtattcatatacatttattgaaatagagagaagacattaataagatttttttttcctcttggtactaacccctgctttttttttccccagaaaaacaaagatatatttcctcctgactaaagtagcaccatgttaaaggatgtagcaatcattacagatatttctaaagaattctcctatgtggatggaaaataatttagaaattttcaaggttagctttacaattgaatacaatctctctataatgagtggtcctttctttcttgaccattaccactcagacagctatgaatgaggtagtaccttggtttttgtttagcttaagttttgattaaaatgcttatgattatgaaaaacaattccaagatgagtttatactttcatgccattcccagtggaatctatttacatatctgacgaacacagtacaaagcttctactccaaccagagaatcacactcatcctcaaaagattgaagagtagacctcaacatgaaaagcacgaaaaacattaataaacaatgtgccgaacatgtgccagtgttggtagaaatgaaggctgaatttaatacaattcccctggagttatcaaagataggagccaatgtatgttaagattttctaagttttagtgatgtttgtaaacttcaggcaatattgaaaagataatgtattttaaaagtggctatggtggctgggcttggtggctcatgcttgtaatcctagccctttgggaggccgaggtgagcagatcacgaggtcaggagatcgagaccatcctgaccaacatggtgaaaccccgtctctactaaaaatacaaaaattagctggctgtggcagcccgtgcctgtaatcccagctattcgggaggctgaggcaggagaatcgcttgaacccaggaggcagaggttgcggtgagccgagatcacgccactgcactccagcctggtgacagagctagacgccatcttacaaaaaaaaaaaaaaaaaaaaaaactggctatggtgataataatcacagtcatttgaatcattactaagtgtaaagtggtattcggagagttttaaatgcattatcccatttaatactcacaataaagctttgagatctgtaatgatattgcccatatttcatagatgaaaaagctaaggctgagcagttacatgacttacaaaatgtccaggcagctgacactgccaagaatccacacaggtctgtctgataccaacaaccattcactgcaatgcctaacatgaattcatgaactgcctgttctgtgtgtgtgtgtgtgtgtgtgtgtgtgtgtgtgtgtgtgtgtgtctgtgtgtgtctatgtgtctggtgtgtacatgcatctgcacccactttaaagatactacccagggtattgatttaccgggagcatgatctgggctgagccagtataatttcttttttggtttgtgcatacccagatttgatgtttttggagattgtgtctgagcatttttctgaagccacagtgcattaaaagattaaacatccatgaagcccaaaagaaatctggagcaaattacaaacaaaacacctactaccagcttcttccaggagctacccacaaattacccacaaatgcactctccctcaactttcatggagtttgttccatttttaatacattagagagaaattaagttaggagtacaggaagaataagttatgaacatcaaaaataatcctagtgagaattttagctttgtaatgttgatgtgttagggatctagcttcttgtgcctaaaaataattgatattttcatattttgtactttccatcctggggagcaatagacataaatgtaacaaatacaataataacagctaatgtttagtaagtgctcttaattttttacatggatgaatgcttttcattctgaaagcaaccctatgaggtatatattattactattatcccctttttaaagaagggacacatgaggccacacatggctaattaatttgcctaagccgccatagctcataagtagcagaactggcctctgaatgtagacaaattggatccatgagtgtgggaactatgctatgctcattattttgagtggcttattggagagtttactaaaacggtcgtatagaaagactaatgagtgaaagaaagaaacagttatcaatatcagaactaaaaagagtttatcaatatcagaactaaaaagagtttaccagtatcaggaataaaaggaactcacaaatactgaaagagcattaagaaaatattattaaccactttacttcaatagacttgacaactacataaaaacaataaattcttcaaaaacaaacgtaccatgaaaaacaatggaagaaattatttaaatgcctctatgtattaattaaattgattctgttgttaaaacttttcccataaactccaggtctagagagcttcactggtaaattcttcccaatactcagaggagggaattacaccaattttagagattatctctgataacaaataatgacgacaacaaagacaatgacatttctcaactctctcttttttttttttttttgagatagagtctctctctgtcatcaggctggagtgcagtggcgcaatctcggctcactgcaatctctgcctcctgggttcaagtgatactcctgcctcagcctcccaagtagctgggactacaggcgcccaccaccacacccagctaatttttgtatttttagtagggacggggtttcaccatgttggtcaggatggtctcgatctcctgacctggtgatctgcccccctcggccccccaaagcactgggattacaggcgtgagccaccatgcctggccacgtttctcaactcttgatgaggacagtataaccttgatatcagcataaaacaagaacattataatatagggaaattacagatcaatttctccaatgaacatagataaaaatatcttaagcacattgcatccagccacattcaaaaatggtaatatgtcaagcaagtatgttttaacatttgaaaattagttgtaataattcactatgttaacataaaattcacatgttaacataacaagggagaaaattcaacacacacttacgattaaaaaatctttacaaactagaaataaaagggaagtgatgaacagtatctacagaaaactttgtagccagcattaaccttatcatcccttattgaaaactttccacctgagattggagaagaaagattgacaatttctaatatcacttttcatcaacattatactagagagaaactatataaagattgaaaatgaagtaatagttttaattgattgcagactattattgtgtacctggaaaatctaatttcaaaactatattagaattaatgagtaaatttagtaaagtatcagaatgtaataataatatacaacatttccatttctataaaccaacactgtacagaaaatgaaagagaatattaaatacatagatgcaaattttaaaatgatgccaaagatttctacaatcaatgctataccatcttatttaaataaacttaagaagacctaaatatatctagaaatagaccacatccgtatattttattgtagatgcaagactctggaaagttgtcaattattacaaatcaatctataattttaattcaatcctaatctaaacttaatcagctgattctaaaatgtatattaaattgaaaagatcaaataattgccaagaaactctggagaattgataacaccaattattaagacctgttacaaatctatagtaaataagatttgtgatattggggaaaatgtcagcaaatagaccaatcacacagaatacagagttcaaaaacagaagaattatatgcacttatctaatgtatgacaatttttttttttttttttttttttgagatggagtctcactctgtcgcccaggctggagtgcagtggtgccatgtcggctcactgcaagctctgcccccccaggttcacgccattctcctgcctcagcctcccgagtagctgggactacaggtgcccgccaccacgcccggctaattttgttttgtatttttagtagagacggggtttcaccgtgttagccaggatggtctcgatctcctgacctcatgatctgcccgcctcagcctcccaaagtgctgggattacaggcgtgagtcaccgcgcccggccttgaatattttaaagaaagattttttttttttaaagaacatacgacatctcatatgtggctcacaaagcctagaatatttactagttggtaaatacagaaaatgtttgcttatctctgtcctacagtgtaaagatcattactattaaaatcagaaaactttggttagtattctagacctgtcactgactcgcctagcttgactatatgtggcagtgactgggaggcacactaaaccagaactaagtgtatcccctattcaacttcctcttgatggatctcaagtattcctgcaatcactttgacaacattctatgccaggtgaagtgtgacgaagattaagtgagagtgaaaagacatggccctcttaaccaactacagtaaaagtaacttacttttgtgaatcttttaaaaacatgtggttatgtgaacccacttcatggtcatgtgaacccgctgctgaccctctcccggggcgctggaaaggacctactcaaatgagcacccctgaagtgtaagttttatttgcttgctgtttcatgatcgacacaccccacatgcatgcacatgcttacatgtacacacacacaaacttattgcacaggtataaacagtcgtttttgtgcttacctttttttgctgtaatgaaatgtagactaggaagttattatctataataagtgaataaaaggctatggcctttaaattaattattttattgagtgattctttacaatcagtctgtaatttgaagtttatttctagagtggagaagtggaatgagaaaagaaaaaaggaaaatttcctaaagtatcagctaggccctgggtttcaatacaacactagctgtggaactaactggctgtgtgcccaacaaaacagaataggtgacttttaatggcctgaagctctcttggaagtggccattaagagcagtcagtttggcaagtcccatttgcctatgttcctaacactctttggaacccagcccatcggaactctgtaaagtatgaacatgctgtggttataaagaaatatggccaaaagtgaatcagctccacaaagagattattctaaaagcccaggaatgtctttttcccctaatgaataagtcagtggagcagttgatgtgaaagttaaggtaaggtaagccattcaataaaatatgtagttcaagaggcatgtatttcaatgctacttctgtcactatcagcttggggaaagttgggcgagtcacttaacctttctaagcttcagtttctttattttatatttgttatcactaagatctttctggctataaaattccatttttcataatgtggaatctctgttaactgtctttactcataaaggaaaatcaaatattgttattctctacttacagtccctgtgtgctgttgaaaagtggagtttcaaggttaaaataacaggtgtctcgcagttttttaaccattgtggttaaatatgtaattggtaaaatgaaaattagtatctatttcacaattcgttgaaataaaacgaagaaagtcagtaagcgtagcttagtctcttctgaaaccttttactttctacattcacatcagtcctacaggacgggtactgcccttgaggaggaagctagcagtttggggggtaaattaaattattggctatggtattagcaatgcaattaagtcacttcttgtgatctgccttttatcagtattatatgagatactcctacaaccccacatgcatgttgattcgtgtgccctttcaactatttctctacttgataggaaaaacataaaggtaattgatcaaccacttaaaatcaaaatgaatattcagttgttaattttattttttttctattcaagtcttcaaaagacattaagaaacatgctctatggttggtaccaaattttggagaaatctgttaaaaattcaagagaacaatatgaaactttacatttagccttttttcattaacataaaatatgcttgactacagtcagttctgttacaattgactttttaatgtgaatgtgaacttacatattaaattagtataaaaatgttgttcttgtcacagttttatgagttgttgataatcacacatgaagcagaatcagctattgatgttatttcaagttaagttaaaagtgaggataggttagttcagtattattttgtgatttttttttcctgcatattcaggaaaatgacctttccccttatgtataacaaattgttttggcaagatttaagatatgattgaaaatcttaaaatgtgaatgaatttggtcttagagaatacctctggggggtcttagagaatacctctgattttcagtaagttaagtttattactgctattttttgataaactctcaatataaacaaacgtctatatgaaaagagaaagcatcaaaatatgttttatatacttctaagtctttgcaaatctgtgtaatatttttagcaagaacagtttctgtgtagcatgaaaacatagcatgatggcttccctgtgttatttcccattttgtcaggggagtcaagtaactgccaagaccacattggtgggcttatgaagggtgatatcccatactccccacccatagtgagtcattcaatggtgaggttcctgaagggtggaaagagtctcagagttctgaggcctcttgaaagcaaacatactttgaaagtgcaagtctgttgtcctacagacgatcctaaatttgcaaggattcagtgacatgtggttaagacatcttgaactcattattggaaaacttgaaaaaaattaggatggtttctgccacacactattttttaaaaaaaatatgattaaatacatgattgcttgtgtttgtatagacttttgcttttagtcattttttaagtagtctaaaagagaaaacgtgtattctattttaccataggaatgtaaaattcctaagggctctatactctatgaactttacatgcactgaaattccatctagagaaatggcgtttaggggaaactgtcaagtgcacaaatcctttgccttttagtttttttcattctgtgtatttctgtgtgtgtgtaatttctgtgtgtgtaatttctctgtgtgtgtaatttctgctataaattagaaagtgtgatagtctatatttttcccatgagttgttacccttaagcaatagcaggagagaaatgaatttattttaatttcaagccattttaaggtttacttctccatagcatggggaaaaatgtattaattactttggaggattcagatacttaatagagcaaaggttcattttgattaaaatatatgagaactggggtaagaagaattgttcttttcaaatgtacactcggcatttaccaagatagctcatattatgaaacataaaataaatcccaataaattacaagcattcaagtacttttatgtatttaaatgtaatatgaacatatgatgttaaaagaaaatacataatgttctctaaacacagtggcattaaatagaattcagtagcagagaaatacctgaaaattcctcaaatatttaaaaactaaattatgtacttaagacatcaaaagaaaaattggaaaatgtttagagttgaataaaaatggaaatatagtgtcttagtttgctttgtgctgctgtaacagaatacctgaggcctaggtaatttataattaacagaaatgtattggtttaccatcatgaaggctaggaaatccaatgtcaagttgtgggcatcttaccagggcctttttgctgtgccatgatgtggcagaagacaagagggtgagagagagagagagagagagagcacggaagggagtccaaacttaccttttttataaaaaaaatcaactcccataataataaacctactcctgcatgacaacattaattcatttatgaggaaagtgacctcaaggaccaatcaccactcaaaaatcacaatggcaaccaaattttagcatgagttttggagggaacaaacatccaaaccatagcacataggatatctgaatgtgggcaaaacaactaaagcagtatttagggacatttttgccctaatataaatatttatattattacgtaacataacattcttcacagaggtataaaaaaatctattttaacattcacatgaaccaaaaaacaacctgaatactgaaggcaattctaagcaaaaagaacaaagctggaggcatcaatctagttaacttcaaactatgttacaaggatatagtaaccaaaacagcatggtactggtacaaaaacagacacctaggcccggcaccatggctcatgcctgtaatcccagcattttgggaggctgaggtgggtggatcacctgaggtcaggagttcaagtccagcctgaccaacatggtgaaaccccatctctactaaaaatacaaaaattagtcaggcgtggtagcatgtgccagtaatctcagctactgggggagctgaggtaggagaatcacttgaatccaggagggggaggttgcagtgagccgagattgcaccattgcactctagcctgggagatagagtgagactctgtctcaaaaaaaaaaaaaagcaaaaaacaaaagaacaaaaaacaaaacaaacaaaaaaaacagacacttagaccaatggaacagaatagagtgtccagaaaggctgcatacctacaaccatctgacatttgacagagctgacaaaaacaagcaatggggaaaggactccctattgaataaatggtgctaggataactggctagccatatgcagaaggtagaaactagaacccttccatacaccatatacaataatcaactcaaggtggattaaagacttgaatgtaaaacccaaaactataaacaccctggaagacaacctagtcaataccattcttgttttggaatagggaaagatttcatgacaaagacactgaagcaattgcaacaaaagcaaaaattgacaaataagatctaattaggctaaagagcttctgcacaaaaaaagaaactatcaacacagtaaacagacaatatacaggatgagagaaactttttgtaaactatgcatctgacaaaggtctaatatctatcatctataaagaacttaaataactttacaagaaaataacaaacaacaccattacaaagtgggcaaaggacatgaacggatgacttttcaaaagaagacatgtatgcagccaacaagcatatgaaaaaaagttcaatattactgatcattagagaaatgcaaatcaaaatcacaatgagataccatatcacaccactcagaatggctattattaaaaagtcaaaaaataccagatgctgggactgttgcagagaaaaacgaatgcttatacactgttggtaggagtgtaaattagttcaaccattgtggtaagcaaggtgatgattcctcaaagagctaaaatctgaactaccatttgacccagcaatccctttactgggtatataaccaaatgaatataaattgttctgttatgaagacacatgaacacgtatgttcatggcaacactatttacaatagcaaagacatggaatcggcctaaatgcccatcaatggtacactggataaagaaaatatggtacatatacgccatggaatactatgcaactataaaaaaaaggaacgaactcatgtcctttgcaggaacatgtatggagctggaggccattatccttagcaaaccagtgcaggaagagaaaaccaaataccacatgttctgacttaaatataagtgggagctaaatgatgagaacacgtaaacgcatagaggggaacacacactgcggcatacctgagggtggagggcgggagaagggagaggatcaggaaaaataactgatgggtactaggcttaatacctgagtgatggaatattctgttcaacaaacccctctgacataggtttgcctatataataaacctgttcatgtactcctgaacctaaaagtttaaaaaagattatgtagaaaacccaaaggaatctataaaaagtctactagagctagagtgattttaacaagatttcaatacacaaattcaaatgtctttctatatattaatgacaatcaacaataaaattttaaaacattattaaagtataatgaaaatatcaactgtttagggagaaatgtaacaagaatggtgaaggacctatacactaaaaagcttcaatatgttgttgagattaactgaagaaggtctaaatagatttttttttcatgtctcggaagacttaatatgtgaagataccaattcttccccaaatgatcaacaggtgaaatgcaatcccaatcaaaatcccagcaattattttaagggggaaattggcaatctgattctaaaattcatatggaaaaaaacaatggagttagaataactaaaacaagtccgaaaaagaaaaagaaatggaggactaatgctacctgatttcaagtcttatcgtataaatctacatcaataaaggacaagttggtattgggttaaagatagataaatacatcagtggaatagaatattgaatccagaataaatccacacatatatggataaaaataccagacaattcagtggagatggttttgtttttacaacaaatgttactggaacaaattgatatatgtattagtcagatatggctgccataacaaagaaccacaaacaggtggtttaaataatggaaataaatttcctcagaattctggagtatggaagcccaagatcaagttgctgggaggattcgtttcttctgagtgtctctttttttgatgacagatgactatcttttaccaatgtcttcacttggttttccctctgtgtgtgcctaggtcctattctccaattcctataaggaaaccagtcatattggattagggcccactctaatggccccattttacttgcattatctctttaaagacactatctccagatgtagccacactctgaagtacttggaattaggatttatggtgcaagaatctgcgagagagcacaattcagcccatgacaatacccatatgtaaacaaatctgcacacaaatccttgcatgcatatctttacagcagcattattcataattgccaaaaactggaaaggacccaaatgcccctgaactggtgaatggatagacagtatttgttgtaatcatacaatggaatactagtcagccataagaagcaataaactcatacacgctgtgttatggctgaccctcgaaaacattatgcccaatgaaagaagccaggcacaagagatcacatattttacgattccatttacactaaatgtccatacaaacaaatttatacaacagaaactagattattggttgcctgaggctgagggttggagcggtaattaattgtaaatacagatgaggaatattattgatatgagagatgaaaatgttataaaactaatttatggtgatagttgcatcacttggtaacattcctaaaaatcattgaaatgccaccttaaatgggtgaattttatgctatgtaaaagatacctcactaaaattgtttaaaatgcatcaattcaaattggatcttagatctaaaggtaaagcctaatgctataaaacctctaaaagaaaacaaaaacagagacttttgtgatcttgggttaggcatatatttcttggatacaaaatcaaagagatgattcaaaaaatgaattttgaaaaactgaacttcaaataaaaattaaaatcatctgtcctttgcagaaactcttaagacaatgaaaagacaatctatagaatagaagaaaatatttgcaaggaatatatcttataaaggactgattccagaaaataaagcacagttaaaatgtaatattaagaaaattatcagccagggtgcttgtaggctttcttttttctttctttttttttttcgagacaagatctcaccctgttgcccagactggagtgcagtggcgccatctcggctcaccgcaacctccgcctcccaggctcaagcgattctccagcttcagtcaccggagtagcttggattacaggtgcgtgccactaccgcctggctaatttttgtagttttagtagagacggtgtttcaccatgttggccaggctgatctcaaactcctgacctcaaatgatccaccttcctcggcctcctaaagtgctgggattacaggcgtgagccaccacacccagcctgtatgctttcttatttgtatcctttctaatattctttgggtctctagggtttttagaacatttacaattactacccctaaggtattctgtaactattcttttgaagaaatgaattaaagactaaataaaaaattgttaatctgtgcttccaaattggttgttgaggtctgaagaagctagcatcagggagtgatagtggatctaaggattcttggagttgtgggaggactttgctagaatcctacagggaagaatttacgaggatattaggacagtttagcaagtgcagataaatgcaataaacatggggccaaaatatgtatatacatcggtcatgcttggtcgctaagtagatagctggcatcaaaaagatgtcgcctaaagaaatgagagtttctgtttttctttctcctctcctttctttttccctcctctcttccttctttctttattctttttttcttgagtgaaatatcatttttctttgtttttcttgagtgaaatatacactacttaaagcaaaatagcacattttgttacatgctagaaaagcataggagattacatttattctcaaagagtaattattattattattattttttttttttgagaaagtctctccgcctcccaggttcaagggattctcccacctcagcctcccgagtagctgggattacaggcgcatgccacgacaccaagccaatttttgtatttttagaagaaatggtcaccgcgttggccagactggtctcgaactcctgacctcaagtgatctgcctgcctcggcctcccaaagtgctgggattacaggcatgagccactgtaatttatttctttattcaacatgtaaaacattcttttaaatacatctcatggaaacatttgaattcctccagttacaggtatatttactgcatctctactctcttttgatagtactctgaagtacttggagttaggatttatggtgcaagaatttgcaagaaaccacaattcagcccatgacaatatccagatgtaaacaaatgaacttcaatatgtacctcaacatatgtccatgcatctatattgcaaatcttttcatgcagatctatgaaaagtctactagagctataatggcctttagttatatctgcatgcaaatttttgcattgagatcttcacagcagcattattcataattgtattaaaaagattgcattagaaagaattgcgttttctatttatacagttgctgatttcttatttctttgataaacaggagttgaattttatacaaatcatggctttttttgtgtaagatattgaggaaatcactgtgaattcaaaacggttcatgttcttaaggagctggatagttattaggtaggcagatacttagataactaccagtaataaagatttgcagtagctagttattggaacacagaagagaaagtagctaactttaccctgggtaggtgatatagtttggatattgtccctgcctgtctcctgttgaattataatccccagcactagaggtggggcctggtggaaggtatttgggtcttgggggtggagccctcatggcttattgctatcttcatgatagtgagttctgctgagatctggtcagttaaaaaggttccatttgacccagcaattccattactgggtatatactcaaaggattataaatcattctctataaagacacatgcacacgtatgtttattgcagcactattcacaatagcaaagacttggaaccaacccaaatgctcatcaatgatggactggataaagaaaatgtggcacatatacactatggaatactatgcagccataaaaaagaatgggttcatgtcctttgcagggatatggatgatgctggaaaccatcatcctcagtaaactaacacaggaacagaaaaccaaacaccgcatgttctcactcataagtgggagttgaaccataagaacacatggacatagggaggggaacatcacacactggaacctgttgggggggtgtggggcaaggggagagagagcattaggacaaatagctgatgcatgtggggcttgaaacctagatgacgggttgataggtgcagcaaaccgccatggcccatgtatacctatgtaacaaacctgcacattctgcacatgtattccagaacttaaagtaaaaggtaaaaaaaaaagaacgtgacaccttcctctccatgactgtctttcatgctcctgcttttgccatgtgatgtgcctgctcccctttgcctttcaccatgattttaagcttcttgaatccctcaccagaagccgagcaaatgtcagtgccatccttgtgcaacttgcagaaccatgagtcaattaaatctcttttctttatatattacccagtctcaggtatttttcgttgttgtttaataaggaaaggatttcactaatttttgaagcaaataagatttgtgagtttcaaagaaaaggctaaccttcctatattaaatgtttatgtctaatgttcctcaattgcaaatgcaagttttgaccattatgcaaaacaaagtcctggaatttacaacattttcttgatggtattaactcttttttctctggcatgctattgataatagattagattcaaaagattggccgtattgttcccagtgtctggcagtatggaatggttcaggagctctaaggtaaaacctataagtgaaaaatcaatgagattttcattctacagatcaatagtttaaaatggtacacaggtactcatatttggcaactttcttctttatagcaatgtaagaatgcctagtagagtagggattaggagaactggtcttgcttggaaaggtttgaggaggagaaagtggttaaacagaaaattgagtaatattttactatataaatgagagttgaaggagggcaaccaggaggaaaaaaaagcattacgaaaaacaagggatgatagagaatgagatgtttcagggacagttagtgactcaatgtgaggagtgtgcagggtattcgatggaacagtggtgcttaatggagcccccaaagcagacagaaaatagaacagaaatggccctgcatgccatgctaaaggatttggaattgatcttgtattcactggagagccgcaggagaagtataataaagggaacaaaagtggacttcagaatgtagtctgtgtggcatgagaagataaattcagagcactttcagaaagaaagcagaaaaccctatactacggctattttattaatgcagggaaaaattatggtgtcctggcataagatagcagcagttgagaatgaagaggaggggctggatttgagatatattaagaacattgaatcaataggttggaatggttgagcagtgggggattgaggaattggtgaagaacgtaaatgagtcaaggatgactcatggattcctaatttataaaaaataaatataatggagacatataaaatataaacattcatttggtttgtgtcattttactgaagaatccttgtttttagcatactttttgtatcatagatattcattaccttgattgaaaatcgaaagcagaagaaatacataaaacattcacaacaaagttgcaagaaaattgctttgaagatacagtttcctgttatgttgattactttgtcctaggctagtgtccttctttatctaaattctgaaatattagctattttttatctgacttacattatacatcgtattatgatgcatacataaaactttaactttgggagtttgaaatacactggaccataagttacatgagtttcagggctgtttacctctatattcccagcatttagcacagggtttcacacatagtaaacactcattcttgttaaatgaatgaatgaacaaatgaatgaatgaatgaaataattgttcaaaaaataccaatcagctgctcaatttgtccagaatcattaaatagcaaatttctttctgataataatggcagaaatatttcagttcaattaggttgacaatcatatttgagtttctggtaccaatatactactctctgatacgcaatataaataatatctgtaacctagtgttcattatccatgaagtataaataatcttttcaaaattgtttggaaatgaaccagtggatatgcattcagaattactttagttaaaactcaagacatattaaatgtacatagtacgttcatgtccttctttattttgtcctgtccccactttggttgttgcctggctggttcccaaagcaattccgaattccagcatgcagaattttatgtgaaacttacctaagacaaaggatgttttattttttcaatgaccactttctttcatggcttggcacataaaagatgtagactttctcactctatttctgaataatggattttaaaaccatattagacatctccaacataatataaactgagggagtacatggtagagtatcttaggaatgtcctgccagtaaacacaagtaattaatcaacccacacatttttttttgttagcctaatttactcccatgagatacagcagtagtaaaattcattcatccaacattctttaatacttgccagataagaagggctacttgcccccacttcagtgacaggttaatagttctattttggaaatgtttgtctaaatccaagaactcaggctcagtgccatttatttatttgggagattgttggcaggaaagtactatacccttacctggcaggagtagtgcgggtgaggattttgccttcattttcatttgtgcttaattcaatctgatagaaaatagctgcagagcacaagtgagaaggaatatatacagaattttcaaggaagaaaaataaaattggtgttaaaattaacttcacttcaacatctaaagtgaagtctcattatcctgtgtacctcaaggacatattctccaaacttctcagctatttctgaggggctctccacttatatttcaacttccttctttgtagccccagatataggcttacacctcctggcttgactgcttctctgatgctatgaactctacattcaagtttcaagccaatagagctccaaacatacaatttctctgtatcacattcacaatgttctctaggcttaaagggagaagagtgacctccacccctcctgcactggagtatatttctctctcttaagacaaccctcaatctacctcctatttagtgatgtttccacatttactgtgcatttcaggtaacagcagccacaggtggttacatctatccttgctttgtactgtctagctcaactaccaccacacctaactgtaccatgccattctactccagtggccagatgccagatgggcactaaggtgtctggcaccatccacagactgaccagtatatgccatagcctagtgcaagtgcaagaggccaactcaatcagtctgcctttgaatgctagatctggacaccagaaaatctggacaccaaaaatcaagatgtccacataagtcatactttcaggctgccctgattatttctcaagtacctcatagctaaaatgtaaaaggcctagctatttttaaaaaaattttaaatagctctgaacccgagaatgctttaagttcacagtaatatagatgaaagctaaaatgtcaaaggtacagctataataacttaaaagacaagtacctttgtgaatcagaaataatctagaaagagttttagaaaatatataaatctatggtcattcttggatctggctggagaagcaggcagaaccagctaaatgataacattgactttttgatatgccattctgcataccggtctcacattcaggctggtaacaggacgggtgcagttgttcctgccatcgcatctcatattcacataggaccgtattaagaatataaaaaaactagaggagcacctaggtctccttcgtaagaaaatctttctggaatgcctccacgtagacttccctatatatcctattggccagaattttgttctatatccattctttacctgatcactgggaaggcagaaggaattgccataactggaagaaaaaaacaacctgtggaatagaatgtttgggaagaatccagcaaaaatgcccaccatgatacatcttttgctcatacattatgttaaaaatgctgatgtcaaaattaaacacactcagtccttcttcaaatagaaacaactcaaagtttcatccttggtcaaattcagtattttgcatgatgtgtaatcctcatcacatctctgctcagtttttcatgttctatatcagaggtcagcaaaatatggccctatagccaaatctggcctgctgcctgtttttgtgtggcccacaaactaatgtgtgtgtgtgtatgtgtgtttacaattgttaatgtttacatttaaaacaagaataaatcatattctttgtttttccttttgtcctggaaattctaaaatatttaccatatggtcctttgcagaaaatgtttgccaactcctgttcaatgggactttgaatgaaaagacaagttttccaccccaatataaccaatatacaatgatacatcattttaaaaatgtaattctaaaaagggattgttgggtgacactcttacatgaattttgtcctaatattggtctttgtgagggtggtggccaatgctccttggaatgtcctgcctattcttttttcctaatgtggccttacgtaaactgaggtcatggaagcatgaaatccaaaattttctaacaaggcttccaagggtggatcttatttgtttcagtagaacaaaacttgctattctaatggtctctccacttttccttctgcctctgagcaagatgaagaaaaaaagatgaagctgttttccagagaccagcacttcatccctgagaaaatgtcaagattataggcatgctctatagaagataatgagttaataccggtaatttgtttactcatatttgaaactcagtttccctatttgaacaatggaaattataatatcttcttctcaagtttatgtatttgatccttcataaatatagaagaaatgtacctgttttttcttgttatcctctgtgatttgctttttcataaatataggagaaatgtccctattttttctttagttatcccccatgagaagcttgacaaacatctgcaccacccagtgatctatattaaggtagtctgattctaaaaattcacaatttgagaaaaatattccctccttccaatttctctctgtccatattcactgagttggtagaaaacctattattttaaagtatatcatcagattgaattattctcagtcacttctaagacaagtttaatctgccatggctagaaatgtcatctttgtttcattattgttacctgagagtatttatacataaggaaacaataagtacctgaaagatatgtaatttcgttataagtacctgagaggtatgaatagctagatcactaatacttttcagtcatataattttagaatattttaaaagggcaaacacatatagggcactttcacatatgttccttgagtcttgaaggagcttttactgatatctgtggtatgtttttaagtcatctgcatgaatagttagtacagcagctttaagtcagataatttcttatagtcagaaaacaaaaaacaaacttgctgcaaacataggaattttaatgataagagaaaaaaatattttttaaagcctttctctgacaaatccaggaaacataatcttcaagtatcatggatttctttgaaaatataattatggtagagcttgtcatttgctgcttttctaataatttcaacaaatttattttctatttcatataattataattatctcatttttagtcttgttacagaaattaatttacctattatatttgatttatatgaattgtacatgggaagaaaccatcacagaatcataaaactggggagagatgctaatctaatccacaaagtctcctataatttgaatgtggttggacacttctaattaagcgttggattgacattcatttttctctgatttctattttctatttattaattataatgacaattttcacctttgaaaaatgaatactgttaatcatatttagtaaaacttctaaaatagaacaatgtttgctttcttggaattactgccacttgtaacttttttgttgtattagacctgtggtagataatctatttaggatttttacactaccatatgtgaaactgatcttccttattttgaagaatggctaaatcaggggagtatttgattggggttcccagaaaccaacaagatgtggattcatattcaaatgcttccaggagaatcaagtaaggaagttaagaaagagaaagaaaggaaacaaaggtgagggtttttttttgtttgttttgtttctttgtttttgtcaaattcccattctcagcccaattccaccaagagctctgagtgtaagtcacaatgcggagtatgttacttacaagagcaagggagctagcttgccttccagggccagtcggctattggccaaggggctgcctaggaagaactgagcacaggtaatcttccaggcatttctgatcctaatagatctagtagcccaggagaagtcctctgaagaatgtggcagaagccggctgttagaggcaaaccacacagaagctggtaaatgtatctcaggggatgtgggtgaaataccagtggtgtccaatgaagggataaattccagaagagaaggctacacatatttttagattgaccagtttaaagcgtgcattaaatcacaagaattaaatttggcccagggcaagtaaatttgatcactaattatcttgagtccactttctgaagttaatccttaagattacatgtattatctccgcatttagccaaatcaaatttcccccagccccagagtatatgttaatagaatttttccaggaaataccaaacataaaagagatgccaaattaagagtgtacaaagctatgggtttcacatgtgaaaaagagactttgagaaatactttaaaaatattgattaccttggatttttttttcagtttgtacattattagctcaaatatcttagcagttggtgaagcatggaatttttatgatgtcttccagaaggaactaaatgtatttaagtacaggcattcttttttttatatatatactttaagttttgggatacatgtgcagaacgtgcaggtttgttacataggtatacacgtgccacggtggttttctgcacccatcaacccttcatctacattaggtatttctcctaatgctatccctcccctagccccccaccccccaataggcctcactgtgtgatgttcccctccctgtgttcacatgttctcattgttcaactcccacttatgagtgagaacatgcagtgtttggttttctgttcctgtgttattttgctgagaatgatggtttccagcttcatccatgtccctgcaaaggacatgaactcattcttttttatggctgcatagtatcccatggtgtatatgtgccacattttctttatccagtccatcattgatgggcatttgggttggttccaagtctttgcgattgtgaatagaagcacagacatttttaaggcctctaaaattagtagaagaaatatttttaagaaaaaattatgtaagagtgattaaatgtcaatgtactaaataaatatggtttctgttttataatctatgattgtgttttgaggtgttaaccacacaattttttaaaagttgatgttaatcagcaaatataaaattttgccagtatttaatatgtaattttgaattgttgtgttaaatgcattgatgtatgtaaaacacttagtggagtattgaccagagtgtagtctcatttcatatgattgagttctccttgccttcctattttaatcacattagcattattaaataatagctactttgtttagagaatctattggtattcttcaattaagaaaagctcttcgctctgtaactctgccttaaataatgttcggtattatatgtacaataatatatattttctaaagtcttctgatctataaaataatgtcatcaattaggcaattatttgatcatttttatccagagtactgtaattcctaaaatgagcatataactgaaagaggatttctacagagaaagagttgttgttttcctaaaactttgagctgatgtccctgagctgtcctagggacatctgatgtcctagccactactctgccccgattctggcagcttctgggggactggctcccataacccccctgcgcatcatcttttctgctgagccacgtcttctacctggcacctgatccgagccccaaggtagtgatgcgacaggagcactcaggtttctgatgctggttctgtttctctctcatttttgttttgtcattccatttttttacatcttttaggattacctggactattccctttcaaatattctggtagggctaattctctactgacatatttagacacaaaaaattgactaatgtagcttcattggaccattagttgttgattctatcatgggaatcccacatgataccctgtgatcggagaaggtgtgttacctcataggtgtgttgacatcctactgacactttccaaactatttcttttagaccatagagattttaattttgatcttcattctgcaacgtgaactgatcccttagagctaacttttgtctagaatagaatctctagtatcttccaaaattcttgaactgtgggacactgagtagggctgatatactgaacctttcagatgccagcaaaagcagtggaatagccaaactgaagagctagtgggcttggctaagagcaaagacatcaggttcgtcaaagggcctgacatctattttttttttatcctgtctcaaagcagctatataaatatgaaaggagtgtgtgagacaaaacaaaattctgcttgggcacaacagctcaagcctataattccaacactttgggaggccgaggccggcaatcacttgaggtcaggagttcaagaccagcctgcccaacatggtgaaaccccatccctacaaaaaatacaaaaattagccaggcctgatggcatgcgcctataattccagctactcgggaggctgaggcaggagaatcactcagacctgggaggtggaggttgctgtgagctgagatcatgccactgcactccagcctgggcgacagagtgagactccaaaaaaaaaaaaaactctactagaaataactgattttatctttgtcatctaaagagaaaacaatactcttggttagttataatatatatttatatattatacataatatttatatatcatatttttatatatttatatattataaataatgtttatatatttatatattataaataatatttatatatatttaataaataatgtttatatatttatatattataaataatatttatatatatttatatgtatatatttatactttcagtatgtgttagtcatgccaaggacagttgcttctgcttagttgcattctttagctggattcaattgtaggtttagtggatgatttaaaatgagctctaaaatagcccaggggtagtaccaaatacacactcaaaagttccattaatgcgtcagattagggaaggctttgtaaagctttctggaaggttttaaagctctgaattatcatctttgttttaaattatcttgtcatggtgcttggtttacctgtcatttttttttaactaaaagatatatatgatacaaatttatcccatatgtaagtgtcagtgttttggggataacatttaaaagcaagatccattaataaaatcacctttgatttttgaactgtatgtagttctttgttcgtatgagcaattcacagctacagtttagtaaaaacttggcttgaggatgttcacttctgaaaaaattacttaaaatgtatgaaatgttatcgctgtaagaacagatgattggtttctttaaaattcctaacatcaaactgccacagccaacagaggcctaaggcttaaagaggcatggcaagttaatgtaatgtggtttcctagatggaattctacaacagaaaaaatacattcgataaaaactaaaggaatcgaaataaagcatgggctttagttaataataatgtttcaatattcattcattcattgtaacaaatgtgccatattcatgcaagatgttaatataaaaattgtgtgtaaccatgcacatgaaaactctttgtgctatctatgtaattttctgtaaaactaaaactgttcaaaaataaccattttattttattttttaaaaaatctcacaacctaaatcactttgagatagtcaggtaataaatgccattttttttatttttaaaaattatgtaatggaattgagctcattacaaaatgcttttctacattgtagctgcctctcttaagattaaagtttttgcctgtgttttttagacacaagaaaggatatcataaaccctttttacattaatgatcatctcctttgagcctcctttttttgacaccattctcctctgctaataggagtattattttctggggtatctacccatgatctgaacctttcctattagaaactccagtggagatgatggttgcggaaacggcacagttcaatgaacaagatttaaatcctgtcttgctcagaactagtgatgtactcttagttacattaatataccatctccatgaggttttatagtcttcacctctacaatgaggccaatagtaactacaacctcataaacatattgtgaagattaaatcacataatagggtttagaaaactgcgtggatcatgacaatcacacaataaagactattactgtttctcccatgtggcagtgtttagaacatccttgcagtaatccctgctaattttttactttagcatatttttgctacagaatttaccaagaatttatactctcacatttggaaaattaaattttcattagctgtcataaaatcagctcaaacattggcaggtgggttacacaaataataaaagtaacaagagaaaagaaataatattaagaagaaaaaagaataaaaggaagaaggaggaagtaggaaagatgtaataagcttttagagtgatcatcattttgcatataaaaggggactgaatgctttacctacataagcctgtagaatcttcccaacatgcatgtgagctaggcatgattaatagaccatttaaagttgagaataatatgactaaaacagtttcaataacctgtccaaagaccaaagctaatagttcatgggaccagaattcaaactctactatcctcaacacagagccacggtcatattgttgggctctgtgtccataccgaaaactcatctccaattgtaatccccacgtgtcgagggagggacctgttgggaggtgattggattttgggggccattttccccatgctgatcttgtgatagtgagggagttctcatgagatctgctggtttaaaagtggcagtttccgctgccctctctctctctctcctgcttcaccgtgttaagacatgcctcgcttccccccttgccttccaccgtgattgtaagtttcctgaggcctccctagccatgaagaactgtgaatcaattaaactttttctttataaatctcccagtctcaggtatgtctttatagcagtgtgaaaatggactaatacacaagggctgccctaacaccttgactcactaaatatatccatcttagagtcttctatgtaggaatactgtcttcattgtagataccaggcctacaataataccatggattttgttactctgccagtggaagcaggatctcctccccacacctaccttaaaatgaaatactcgtgacacttatacatatcatggtggtctgtaactggagagattttcttatagtcaaatgtgttttctaaacaggtcaaacatttaagatactaatattgcctcccaaattttcagctcttcactgaattttagccttgtagttctttctctttctgttttacatgaagcaggtttgctcttttattttcctttttgctactggatttttaaacaaaagtcagtaaaagttaactgagaatattttaacactttttctgggaagaggtgcagtcaggcataagattgttaaaacattttgtagctttggcttcactcattaaaatgtgtagtatgaagaataagcctagggattttgtaatgaaattatttgatatattcatgctgtgtttcattattcataacaaaaaatatatcatcagtgtgtcttgaattttctctctgattctccacttctttttccttaaaggagagagaagacctcattgcacaaccatttcagatgtgaatgtagatattagagtggtacatctgtttcatgcattagggagcttctcttgggtctataaataagatctccaccggttccattaaatcccaaagtatgaatgggcttttttatgtcaagtatgaacgaaatagcatttccttgggtgtggtagggaacactgatacactcttggagctgaacatgctagcagatttcctatctatgccattggctctgatttttctccctttggaacaagagttagaagccaagagttagattctcttttcttcctggaaattctctttataacagaattgaagtggttatttgcaatttatatggaatacaaatgtgcatgtgtgtgtgtaaatatacgttttattggtaaaacaatctgttggctaaaagagttttaatgagctgttgaagttggggattagtgcaaaattctttttaggcatagaaatcatagaagatattttatttttcaaacatttctaaatgattttttggctaaaagatttaaaaggtccctggaaaataattttcaaagtagcattaaacacattagaatgggtttgcaaattcatttctctatatttccttctctgaatttttctacattttgtttctttatattttaatggagctacatgatttaaaaagcagaattcaaaatattttggtcttgattcatattttactagttataatggtaaaattttcattttactccctgaataaataaatagtatccaacttaaaatataaacttgaagattatcattaggatttagataacattgtctgcattgcgaacataataagcatatttctatgagaaagttcagaactaatgagatccactaaagataaagtcatatttactttctcctcagcagataatgcttcctaatgaatccaagctatctatttcttgttattgctagatttatgtcttagcaatgagatgcattgactccaggattccaggtctctgagaaagctttggaaaggggcttcttgagcttattgttacttcaagccactgaatcttactccctcttgtgggctcctagaggtgctagaaagagttatgcatggtagatatagaaggtatataaatgatcattacattcccaaaagcttcctctattaaaaaagaaaacatatttttcttccacaaaataggatatgtgcatttcacacccacccttcactattattcaactgattataacaaaccagtattttacatagaaagtatacttggcttcactggttggaggaatttttgtatgctttggtctttccaggtccttagtacaactggatcttcagaggatcaaagaaaagctctcatttagtatcatttcacctttgaaagaacattctatttttctttatggtaattcaaatcaaataatgtttaattgatgtgttatatttcaattccatagttatattatgtaaggctacgcaaatgttgttttcactgaatatttgtgttgtattctttcttatgtaatagctaatgttttcttaacaaaatgacaagtccatatataataatgccactaaacacctaaggattaaacagcactagtagttaaaataatgatgaatatttggcagacaataagggaaaaatgaagccacattctagaaacaaatatatctgtttgtcatggtgaatgctatgagtttgtattgaacttttcagtgccaaaaccaaaagacaaatctctgttctttaattgaaactgagctgtattgaaggcaatgattagttaatgaccgggtccccagatgcaactatcaatagagtatgaagcaattaagagaaatatcaggatttatagaaagtgtcaatattccatgaaatgtcactcaattgtatatttctgggaggtcagacacttaattcctttcacatatggtgcattttatctgtgttgaatttttagtgcaccagatacaaatggagttagcttgcattaacgtggctccttaaatattattactcagcatgactacatgataaaaactaatctttctttttactaagcatatgggcttttttctatggaaagcagctgtggctaattcagtcacatctaagagtaactcccacctgtcaaaagtatttgaatccatttattcttccataattagaacattctattgactttttgctatctaaagcagggcatagttccgcttttatgaaacctaagttattaaaattatagtttaatgtgttatcattataattttgtatccaccaaatacaaggaaaacaattcgagaaaaaataaaattatttcatgaaaagcagttactacttactttatacaaatacaaacgtgtattatgtttgtgcaagcatgtaagtttatgtttgtcaattagcatgcaaatgaatttcttcaaaaatgatttaaaaattattaaaatccataagcactgcctccattgaaccatgcaaaatgaggggcagatgtgtatggcacaaatctagggccagacaagtggcttccatgaggtactttcagaatttgggaagttcaatgcaaatagattcacttcccatgagccagtgcctcttacatacatcactggtccagggtggatggttgaaaaattctttatctttacatctgaagacttggagtcccgtgtcccaaggtcaggggatagtagaaattcaaatgcaaatatgcatatataaaatctatctttctcacttatacacttctcaggcagttattaccctttggtgagatttcccagactgtcctctcacagctctgtatctctttctgcccatgaggtttggggtgggagtggagaaggaatgagaaagtagaaaactgatatgggattttagcagcacggtggggtaatgagtggatgtgtattaaaatgtccctctataagtgaacaagcttcaggtcatttctgcctgactaatgagagctcaataggatctcccacaatctcaccccctattgctgccttgagacagtaccttgtcctttgtgtaggataatgtgtgggcagctttaccataatagatgtcattcaaaggagggacaaccaaaagctgaatgctgcctgcgttgcagtcttggtttagtttcctaaacccttcaccagaggaaaacaatagtgtaaatgactaacttccgtgactagcatagaagtatatttaacagatatgtgttggatgtatagttcattcatatactaataactgacaatagttctcgaagacctagagtttatttatcattattgcaagccctgtggagaatacaaatgaaataaagaacaagccaacaagccttgattatggctacagagtttgacttatacatattgtggcccagtacattcatttcaatcctgagtgtgtttaaaaaaaaaaatcccatggcaatcctacctttgctttttttttttttttttggaaaaagaacaaactacaactaataaatagaggaatgtcatttcaaaagagttataataaaccatttcctaataagatacatgagtaatttattattttctttataagcaaaaagaagtttaaataactgaattttaattttaaaatagtgccttataaactttaaaataactagtaattttcctccattcctttacaatatactacaagatgtctaagtaattcacattcatagacaagtcaccactgaagaagtgctatcatatagcaattgaggagtgttagctatatctcaccattaacaatggggacagtctgattctactttaatctacaacacatacttattttttaaatctacatctttgaaattttatgtcaaaactacatggatgaacatgtatagttttatacactataggttgtagggttgaccaaataattcacagcaagaaaaattggtattattgaaaataagctattacttataatgtaaaagcaaaaattgctgcaatcaataagtaaccacaatcaatttaagttaacacggaatgcactgatagcatatgatgtttttaaaatagagtaattccaactattctttctacacaaagcctgtatggcagtcagaagtcttagaagattatgaaaatacttaggaactctttgtaatgtattaaattttgttatgactacaagaatttagtaacctctaaaaggtggtcatagatagcttttagttgtgcatacaacctatagcctattgacctgttaatcatttaacaataaggatttaggacattgggagggcttctgaccccactactattcatgccctgaaaacagccttatggaggtggcaggataataattcatgagtcagtgagtgtaatttatatgttggtatatgtcagtcacaatacattgaattttttgtgacatttttcagagcagtaactataaaaaagtgaattctaaagaaaacaaaagagttgaaggaaaacaagatgttttatagctggtgctggtgcagagcaaaaccctctctgcttgacggttagcaactgaaacacagttttgattgatacttctttgggccatctcttttataaatgataatgacaaaccataacataatttttaaaaagaaaagagaggaaaggacatttgggctttctttcagtagttaatcatgggaaagctaaggaaggaagccttcctgggtggagggaatgatgtagtccattgcccgctctctctgggacacccctctctctgggactagctgagaacaagtagggactaactacttttggcaaaacaactgtcacaagccagaaatgaaacaaaggtccctacttataaggaaacagaaagagatgagtgacctaaggcctaaacttcaaagcagtatctttggagtattttctaaggaaaatcaagcaagctctgaataaaatgactcatttatttccttctcctgtctttgggattgtcaaacgtcaatatgttgaagttatgcttactaaaatgcaaaaatgctggtatttcattaattgaggcagaatgctcatacttgttccccaactgatgctatcaagagagaagggtcgatgagctacactttgagaagcattcctgcctctctctaccctccttctttgggagatcacctccctcatacttcacagggaaaactgaagaaatcagcgtaaagttgcctgaacttctcactctataaaaatattcacatttgcagccatccattctttctgactgtcagataggggcaatgtggcctttgttctgttccagactaatcttctctcctctctcccacccactcttatttgcagagggtcaacatgaatctataccctttctttctctctctcccatttggtggttttccatcagcttttaaacatccatatcctccacctcaacgtatcatcccttgattatcctctgttcatccttcaatctccctctatctctctgttttcaattgtacatttggaaaacatttacctatgctcattgcctctattactttcccattcatcaactccttatccgccttttcctggcttatgccaatgtatcctctaaaactcctctaacaagacctgttagctccatgtcagcactgctttggaaactttttagatcaagcttattgaatttcttaagtttacctctccccttttcgtgacatattgttttctctttgttttcttggcatgtaaacaaacaaacaaacaaaatggttgtgcttctgtctctctcagaagaggctttcagtttttttgagtctcttaggccagttgtcttcctgttacacaattattcaacatcgagtatcctcttaaacttttttcactgcttgttttaaaccctatttctatgtggtctcattaatatagttatgtatatgctaacaagtcccaaaggtacatccattagcttgacttgttttcttagttctagacctagatggctacttgtcattccttacacatatatctcacagatacctcaaacttactaagtacaaagttacactcatgatctctttataactgttagtatttgatattttgtttcttattttatgaccagaagataccagttgttcaggccagaattctgagagtcatcatttacttctctattaatataatccccccatacaaataataaatgccgttaacctacatcataaatatgtttttaattcacttatttgtctcttatctctactcacacccaccattgccatctaggccaactccatttattgacaggatgaatacaactatattttcataactgtctatcttacatcaattattgtcacctttcaacttattttctctatctttgaccaatgaccttacaaacgtgaagtttgtcattctctggttttaaaaagaagtcatgaactcaagtgtgccaagatccaggccaacacatgagtgagttgaggactgttgaacttgagattttatggtatcctctctaaaggggcagacactacttaactttggctgattgttccccatagaaatacatggtcagtgtttcctggtcatctattttttttcaagagaagaggtacttatttgttcttttctaacaataacccacatgtaagtatttgtttaatatatcattccctactgtgctctcagcaccatgaaagctggggcctcagctatctttttcactgcctggcacataacatgcattcagaaaatattttttttcaacaagtaaatgcatgagtcaaatcaagagaagaacagaggagaaagtgagtcataatgcctacaatggccaaaatattggctaacatagctgaataattttgaaattttttatttttttcagagacaaggtattgttctgtccctcaggctggagtgcaatgtcacaatcatatctcactacaacctcgaactccggggctcaagcaatccacccacctaagtctctgaaatacatggggctacaggagtgagacaccgtgcccagcttttatagccgaatctcgaaaagtgaataggattttctcagttacacattgtgaggaagtatatttcaggctggaaaagaacatgtgcaaatatacagttgtatgcaatcatatgatctattaagggaactctaagacatttggtgctgataagatacggtcaagggatggggtagctgcagattgaaacagtgaagtcccagagagctcaagtggacagttatgccgtatctcagcatttgaactccatctgacgagttagagagccaaagattcaccttttagaaaaatagttgtatcaacattatgaagaatgaattctaggagaaagaggccagaagaaggaatgctggttaagaaactattacagttactcatgtagaaaatgataaaggaattagttgaagaaacagcatggagctggtggaggtggatttgagagacaattaggagtagaatccaaaagctctacaagccgcccccttagcacaacggccacactagttatttgctattcttagataaacattgcattttgttgcctctgtgtgtctcctcaagctactctctacacctgaactggatttgtgttacccaagaagggtaataaatatgactttatttgttctttaaggttttgattctcaaagtgtggtttcagaaccaacagcaatgacctcacctgagagcttattagaaatgcagaatctcaggtcccatccagaccctagtgaatcagaaactgcatattgacaaaatcctcaggagattcatacctacactagcccacactagaatttcacaagccctgtttaaatctcagcttaaacctcacttaatccaagaaaccctttttggttttcctgatctttctgattcattaaaataaataaagctgactagtattatgtttaacagtttctaggtatcagtttcacttatatcatggttatttatacatgtgccatttgccttttactccttcctaaattattagctctaggaggcaggagcagatcccaatcccattggtattacccatagctcctattcaagacttgacttctgataggctttccccagagatagtgatggtgacttctcttgcttcacttggcaggcaagttgagtctccaagtcttatgataatgcatcatgctgatttcctgactttctttgtccatcccttgataatgatctcttggctttagtaaagcactgtccatgtttaattaattaaattcctctatttgtatttggaagtgttagagatgcaaaatttattcatttaaaaaacacaaaggatctagacaatcttacaagggacttcttagcagtagtcttcaaaatgtaatattttgctgaattttggtaatattggcttgaaagaaatctctttcagagctcaccatactgtcagcatgactgaaaggaattaatacatttttctatcataaaagcactgaatttcctgtggccaatgtgatataaccagcacccttctgaattattttccatttgttttatgtttaaaatttagaagaaaatacaacgtggtagactaggctaaatttaacatataatcctgtgaaagttttccttttttggatggcatattgagttaaggttttttaaaaagtgagtccctcaaaacatcattctctcttaagcagcagcgtgtactttgaatggtttggaactaagtgttttagattaaaaaaaaaagtctttcttaaataacatgcagctaacagctggaaaaagggtagtgaagcggtaaactgtccattatgtttaaagaacaacttggctaaaatccttccttctcattaaaatcactgagtgtgccttcagaatttatgtaactgtacttagggtttctgttaaacccatttattattttttttttcatttctaatctagactaaataattaatccatgtcaatttagaattccttactactttttaaaagtgtatgttagcctatttttagtttccatgagaattagtaataatgaattttcagaaagtaaaaataatgaggctttctggaagaaaccactggatgttttacaagttagcaaggtgtgctttcagtttaaaatcattccactgtgtttcttgtgaggtttctaaaaaatcagatagaactttaaatgacattcagagttgaggaaagaggtgaggagaaaaggaagcagcacccattattatggatttgagtaattcatcgagtgattcagatgtagtagttctattaccattttctttgacatggtccaaaagcaaaggtcaaggtcgctacacttgtgtcctttacccaatgccacagtcagtttagaaaactgtgctttaacttacaatgataacatcagagtgggctttaaattcagatccacctataggtttaagactcattagatttatccttgtccggccgggtgctgtggctcacacctgtaatcccagcactccagagggccaaggcgggtgaatcacttgaggtcaggggttcgagagcaacctgaccaatatggtgaaaatctgtctctactaaaaatacaaaaatattagccgggcgtggtggtgcacacctgtaatcccagctacttgggaggctgaggcaggagaattgcttgaactcaggaggcgaaggttgcagtaagccaagattacaccattgcactccagtctgggcgaaaacagcaaaactcctcaaaaaaaaaaaaaaagggaaaaaaaaaaaacaccgtttctcaatcttctgtctcctttatagttgctctttgaagataatggatattttttctatgccttctattttctatatatcttcttgccccattccactctctgcctccttagttttctctttttctttttcttttttcttttttttttttttttttttttttgcagtggcttaatcttggctcactgcagtctctgccttcggggctcaagtgcgtctcctgcttcagcctcctgagtacctgggattacaggcccctgccaccatgcctggctaatttttgtagttttagtagagacggggtttcaccatgttgtccagactggtctcgaactcctgacctcaggtgatccacctacctcggcctcctaaaatgctgggattacaggcatgaaccaccgcacccagccctttgtttacttttatccatttgttttatgtttaaaattttatgagaaaacagcattgtagaatagacactttttttttctttttcttgctttaggttttctgaatttctggcatctggaacttaggaaactatcagccattatttatttgaatattccttctgccacattttctgtctcttctaaccatgacactccaattaaatgtatgttgaaagtttcatgcatattctcacttttttttaatgatctgtgctgtttcatttattcctctttttttggcatatgtttctgtttaggaatttttgtcctaacatgtcatttagttcaaaactaatgtatatagtcttatgttaaagccatcattgtatcaatcttagatattatatttttagttttagaatgcccatttgaatcttttttattaaatccaaattttggtcaaaattatccatcctttcatctattctttccattctttttttaattttctagcttgtattatttctatagttatcagccctgttattttcacagtcattaagtaaagtccacattttattattccaataactggctcttctatttccattgtctgtactatttttgatcatgtttccatttatcatattgacttataattttaatataatgcacaatatggtgtataaaaatcatatagtctttggatgatgttatcttcttccacaaaaggttgaccctgaattcaagcaggcagcttaagggggagcaagtctccctaatccaattaaggactgagctgagtccagacatttttttgcagtttggtgaagctcattcaattactctttcaatttgatctaaagagttagatctccaagaaccacaactgagatcctgaaatgtttattaaaactctatttttatgatcagatctgaacaccaattttagcttcttagtactttaagattactaaatattcattctatgcttttgtggcatttgacttggctgcttaatttcttattttgtagaacttaacaatttggcaaatgcctcagaatgacaggccttcaatccatttctctctatttttttttttttctatatcgtctaggcacatcaatttctgactatcttggtggttctaaactctaaagttctggtttcttaagcttatctcttgcttgatttctttataattctcattccggaggagagtggagcaactaccacaaaagcccttaagaaagaaacagattacagatgtactcaaatcaaattggcttacttgcttatatttttgtttttcatggatgttggccccttaagtcctagttgcctcagcaattctctagagcatttacatatgaatatgtgtataatttataaagaattgtggtagttttacatgctgtaagctaccccatcctggtcaaaaccatgggggtataaataggtatgaaaatatataggtgattccatgcattgtttttaaataagcacagatgtaacaaggtagagaattaagaaaataaatacaaatatattactgtatacttagttgaagatgatacaatatttatttttatatgttaggaaaagtcaaagaaagagaatggaagttcatttgacttttgttaagcacaaaaattatgcaagattgacacagtaaaataaaatttgaaccttaatgtattcctaggatatactgctggaagatttatgataggatgactcaacatttctacataccttcttcaaaggcattactgtttatcaacaatttttagcttggaataattactactaaattccaaaaatctaatagtaggtaaaatctgacactaaacttacagtttatagtagaatttgctctaataaaaatattattcttaacagttttatttctgtaaatgtagatgttcttttaataatgaaaagtagtatattataaagtgaactaaaataacataaacaagtaatcaaatgcatgcagttgaaatgattcaaatcttcacaatggataaagtgctcagtgtttcatttggaaattttggggtcaggtttaatagtactgcatagggaaaaaagagctcaagccttatttattttaaggacttctgaaattgactttgaaaaacacttacattgaaattcacacgaaaaggagtatgtagtagtttaattacactattgcatggctttagaaattatatagtaattttccgttttaaacagctttaaagaataaattcgctaagctacaaaatattggaatcacgttagttaacaaaggacatgtatgtttatggaatactaaattaatataaaaaaaagaattgaccttacctttgtaaattaaattaggaaaaattaaagtttgagttatatacattttgatatgctgtagccatttcagatgtataagttattacttgttaatttattttttcagtttcattaatcacttttacacaaactatatgcaataaaatgttaaaattacttgattttttttaaattttagactctgtaagttatcagagtttaaaaccacttagctacattttgatgtatttattgatatctggcttaacttttgttgctgttttgattttaatatattaaatgaagcaacttgctttcccatgttttgctttgagtttataaggctcatagctatgatgtgagtaattcaacaatttttggccttacacattctttttactgaaatgtctttctttaagtctccaaccagagggaaaattaggtaattaaagaattttttcttttgtttatagtagaggaatgtgtggacaaaataaatattatttctcttgtatctttttctttgcttttttaaatacaaatgtttcattctttgtaatatccatttcagtgaaaatggttagtcctcacattgtgataatattttgttttgtttgtaatcattctttagttctggggaaaattctaatttctgatggaatgttacttatggaattgattttacagtagaatacataccttttaaaggtttcccctgccttaatcacaaagaaaggaaactttacttctgatacttatgctaaaactaagagtcataaaaataagatgacttgatcaattttaagagtaaatgagtggtagaaacagaaggaggagggagataaaacatagaacaagcttcatgctagtgccttagaaatattagctagttaaatcccctgatattcctgtaagatagattcttcccatcttacaggtgaaaaaactggatctcaaatccaagtgggatgacgatgacaaatgtgcattattccacagatgtgaaatgtataaagattttctttttagtcttactttttattatggaaaattttatgtgtaaagaagcttaagaacccatgggaatacagacaataaatgtcagtgctgataattaattgcttgcattggctctacccatcctgatgttactctaattatcaggatccagattagcactgtcactgtcgtgtattagacaaggagagttttctacattaatgtctgaaggaagcttcatctgttcataaggtcctgtattcctttaaccttcaaagacaaaaattcagtctcattttctgctttgctctggagatccaatctttcaataggtccttctccccaggtgtctgtggaaatcccaggaaggacttccatttgccacacaaccctctgctctcttgcccagctgtttgcctccaaacagctctccctctctactcccgttcattacttttggtctggagaccagcattcttagactatctctgctccttcttctataactattttatccaagctacggatgcaagcctttgatgtctcacaatgaatgcaaggccaggccataaaattaaataaaactttattgcaacagagataatttaaaatcaattgctgagcatgttgctttttgagttcagaatccctgtaggaatacacaacccccctccagctggagctaacttctgcatttttagaaagattgccaagtaaaacacagaatgcccatttccatttgaattttatagaaacacagaatagttttatagtataaaatgtatcaaactatcaggatatatttataataaaaccggaacatacttataccaaaacactaggatatacactaaacaagaaatttaaaaatgtgatgcttatctaaaattcaaattgcactgggcagcctgtatttttatttgctgaatgtggcaactctagtttccctaaccataggagagcactggactaagtcttccccttccagggtctaggcctctaatttctccaatcttttatctttagatctattacttacagcatcaatgtagttttattttttgtttttgttttatgttttgttttgtttttgtaagcatatgtaaaatacataacgtttttggggggtaaactagcatcaaaagagctagattctgactcttgctctatttgcaagtctttggacatgaggatgatcaaggaacgcttctcaacttccttttatccctattagaattcagctcaaacagtaagtcctgccttgcatggtggctgtgataattaggtaagaaatcaagggagaaggcattcagaaagcataaattctgacccaactatagagaaatacgtacagcttacattgtcttttaggttatgttttacgttgtgttgtttcatgggaatgtcatgggggagaatctataaaccgcagccagatggtagaagagcatccatcaaggagggtagacaacttagtctttggtctccattctctctggatgtctttctgtgtctacctgtcagcctggaccatgacatctcttctaaatggaatctcaaatacttctgattggggttccaagccatctgccctcctatgtttctgtccaacactgttaacctaatgtttaattatgtcttcaggcccctagtccttaatcttggtatttggcatcacctgatcttaattcccaatcattttcgtggtggttttgtttgtttctatttctggatgcatgtgtgtgcttgcttttcctctagactgttttcatatcatttgaaatctaatgtccgccctcactccccccattctcagtggtattaaaagaagtactgtgtctcttctctccgatgtttaaaaagatctttccaaatcatttcaccaaattttgctttctctaaagattttgaatgtttattatccttctgaaatgttggcatattcctgaagctaactgataccaaatgttatgtaaaatctgtgaagttgctcttagaaggtggtatttataaactatatgtaaatgtggagtttcagctcagagagggctcagtatacctctttccaattccatggttcccatgtgatgtgcttttggatttcaagacagtactccaaagctaaccattcatttgggcctagaaatgtgttttctgatagtgtggatgttgtcaaaacaacttgagtaaagcatttgattgagtgctgctatgaggacacccccaagaaatttagcatttatgtgatattcccctttttcttaggagaataatatcttccaagacttttaattcccacttctaccttccaacgtagttatcaggtgataaaggtattttttgtttatagcattgagtgctaacaagattcttcaaataatttaattgaatgccttaaaatctatggatctaatttctgtttgttgttgttgaatatggataagctttcaaagtggagctaattttttagaaaaatagttcaagtactgaagtattgtgagaaatgttatttctttggctggactgcctccctgttgctgaatggttggcgtacacgtcatgctatcaaatcctatcattctcccatgctaaaaaaaaaaaagtcagacatccaataaaataatttggcaaacccggcttatgtattctgtgaaaataaaatcagtttctacaatcaattatttgaaaggtcgcttaaaaaaattctgtttccattaatattttaaactatttccttttagttgggggaagaaaggagcaatgccattctttgtagacttaagtaaataaatgacatttcagtgtataagatttagagtcattcctacccaatttagttttcttctgtaaagtttatatggcaataaaattttctctatttttctcattccatttttttaagtggaatacagtattttaaaaattgaataaatacatacagaatttcatatcaatatttgttggcataattagaaaaaggagaaaaaatttgccaaataaaatataggttgcctagttaaatttaaattttatataaacaatacttttaaaaaattatatcccatgtaatatttagaacataacttacactgaaaaatatcattgtttatctgaagttcaaatttcattggatatcctgtatttgctaaatctgttaacagtagaaagaagataaagcagatggtgaagttaaaaaaaattgaggtattatcaatgaagttttggacagtacacttgtaatttagactagaactctaatttcattagctgcaaagtaaggaagaagatacttaattcctgcgtcttcacagaagttactacattccatggacagggccaagattctgcttgaattttatagataaaagagatgcagagagattcagaaacttgcctaagctagcaagtggtacagttaagattactctttctgactatagtcagtctgtctccaaagacgactacaccccacctctctaaatgtttcatccccaaggaaaggattggaaataccagacagttgttcactggcaaagttcttcatctgacaagtaatcatgatatcccaatcttgcaatgttactgtaaaggattgctgaaagatatgaatatatatcaaaacataaatgagagtcacttgacattaacatttgttttctttgttaagcatgtaagtttctctgaatcactgggatcatgacaggattcagaaagcaggacgtggtattaagaaaatgagaggacaaggagataattttgaatcttttatggagaaaggcattgaataatgttaaaataaaagaaacaaggagagaaatgcatcctcgtattagtgtatgatccatagccaagcaaaacaaaatttcaggtatttcatgaaaagctgtagggctagagatcttaaaatattttcaatgagagagaaagagaatttatgttaataggtctaatgttactaattttaggtgtgcatatgaatattagtattgatgttacttatatttactgttgtgttgtaaatttgttatttattatggctctcaaagttttatccctaattttgtttcctaagtcttttttagtctcctataataatagtagtagtagctgtcattacatgagagattctgtacaagcacttgacttgctagctcttggaaacttaaaaacgtctttattaggagtatatttgtgtgtgtgtttagtttccctgttttagttatgggtaaactaaaggccagtgagtttagaaaagcactcaaggtcacacagctagtaagagagtagccaagttggaacccaacagcccccactttccttctatgttgtactattctgcttctagtcatgtcttaactccattaattattatgattgatgaatacctgggttaaattgtcaaatcaatgctgaaaaatctcaactctcactcctagatttaaaagcaattttttttcggtgcaatttgaaacccttagagactttctggttttagggttttgtaggtttctgtcttacttttctgagtaattattttaatggcctttctgattttaattttaatttaatttaacttaatttcaccatgttgcctaaggggaacactacttctgacttgaaattttctggaagtcctgatacaactttgactcttgtcattttaaaggaaaaaaatggcagcatactgaaacggtaaatggaaaggccatgttttttgagtgacaccattagagtaaaaactagccagaggcatctggtggacaagcatctgagccacacaggagggaagtcctgtccatgagatgcattcacgtgagtcctggattcaactgcttagcttggctccaccatgggttcttctcaaaaaccaaccttacaaagttgttgtaaaggctaacaaacatatttatttatagaacaatataaatgataggtacttgataaatggtggttattttattagtatgcttaagtaatggagcttaatccattcaatcaatttctctatttttcacagagataaggaaatgagctttttgacagcttttccctgctattagattagttgacaagatggtgttaatacacccattcaaccaccgtggcagacactgtagttcccggacagtgaaatttttgttgcaccaaatacgattattgtggtttttgtttacaatgctatacatgtttgttgtttattttatttaactttagtagaaatgagttgctttatttaaaaaaaatgactgctaatttgatcactgaaataaaattaaatggcagttcaagatgcagacttctaaccaagctctagtattaaacaatgctgctactttccaattctcactactcatcagatgtgttgtatatatccaagattgcggaatttgggaaaaaatattttttcatttaagatgtcaagtgtattttttgagtagatcatcgtgaacattgagaagttttggatcatttgcccatatatgttaactgaataaatgtactggaaaaatctctctcagcattttaaactattgacttgtttgttaatgcaaatttagaatatatcatgagacattctatcccaagatctgttgaattttgttgtattatagaccagggaataaacaaaaaatctacaaatccaaaaaataagagcatagatgagtattttcataatatttttgaaaatctctgagaaagatgatttataagaaaacataatactgggtcattttgtctcccatctttatacaacttggtgagttgagtgtctgttgagttttgctgtataatagaccaggaaataacccaacagttcactataaaagcttagatggatattttcataatatttatgaaaatctctgagaaagatgaaaagaaaacacaaaactgggtcattttgcctcttgtcttcatacgactttgtaggtggtcattaaaaataattccatcctagtccatatgaatgctgtaattttgttaaatattactagaaataatagagtttaaaatataatacttgttaaatattactagaaataatagagtttaaaatgtcatacttaacattctaaaaagagaaaattattaggttggtggaaaagtaattgtggtttttgccattacttttgcacaacctaataagttagattatcattattatggaacattatcttatattatttccttcaaaaaggtgtagcttttcaaacgccattagacattaaacccttttaacacatgagttgtttgtattttgcttttctaacaagacatctagaatatgctacgttttctactttagcattgtttcaactttgaataattactttctgatagattgaatgtaggtttattgagaggaattatcattttaaattgttttggatattttttcctttactactcagcaaatcaaaaactattgtcaatgctctaattatgatttatagagattaattcccactaccaaagtgttgatcatgatttttttttttttacaggtactaaagcaggtgttttacctaacatctctgtgttgccaggttttgcagccactgaagttattgatcacttttcaaaaatgtctcactttgcatatcgactaccctccgttgctccctgctagtttttaaatctgcactttggggcactagaagtgactgaaatatcagttaagtcctatttgacaaatacgtatttagagtaaccaattcaatagggccataaagaaactacggggttagtgctagttaatattgagacatcagttttgggaattttgctgtttattggtggaagctacaacgagattttgtgtagtttctattaaaacaataaaatattatctgattcataattcagttcaaaatacgctttaatgttttgctagatgtgttggacactcagcttctatttccatgggctgaataattgatgtttacatttcccagacatccatacagttagggttctaaaagtaagttacatcttccacttggatttggaacatttcctcattccaggttccagaccgctatatcaacagactcgtagaatgttactgaacacactgaacacactgtttggtggtgaacagatggtggctaagaagttgctcatggttcctgggagtcctaaccagggcctgatacggcaaacctttcaatgatttgtaaactcctagtgtatcttatctccttaaaacacataaacacgtaaaactgtgtctccttaaaacacagcatggttttgttttcaccactgagcccaaagtaattaaaacgaactgctatcacattcatttgtgtgtgtgtgtgtgtgtgtgtgtgtgtgtctgtgatttgcaaaatgatataaataggtagataacattgttaaatagataaagccttagaagacgagaggatacaaattaatatttattatacctgtgttcactacaacaatccagtttgtgttttgcactgtaaatcccaaaatgtgttatattatttttgtcaactagcgttgccaacacaaagccaatataagttgattttacaagagtatacatataatatttaacagctgggtttgaaaataattcaggttttaaagttggaagtatcttcgcttttagtaggtaaagaaataaaaatctgagaggaaggattaggtgatgtaatttcttctgtttgatacttaaattccataagagtctatatttgagaaatataaaaatattgctgagtagcacttttctgggactttgagaagtgtgggagacagaatgcactttacgaacattttttatgccttgtaaaaatagcactacatatatatgtgtttaactctacatagcaatgaacttactttctctctgctttttatattcctttatggtttactaccttaggcattaaatcaagaatttaatatgttgaggggaaagggttgcatatcaaaagtttctttcttcaagcaaatatgtggtggattcccacatgtctactgaaataaaactagggaataatatgtatgtgtattacaatattcttttcaagactttggcaggagaattatttaagtatgtcattctatcttgaaagccaactatgggtttatgagggggaggggaatacatctatacattaattcttgcaaggttaagaagttttgggtttgagtctcgtagcactaattaaaattttgtggttttcaacaagtgatgcattacatttgatttattctgcattgaagaagaaagaatatcatctctcatctcatctaatgtttatcaatcgggttagccattctaacatagatttgatgtttttaagcatcttaatgcatagttaattgcaattggcaaataacctataaatgcattgtgcaatgggcctgctggtatgggatgaggtcagcgtaatgcatggcgagaggcagcttagctttgtggctaaacacaggtgttctgcatatctgggctccaatatctgggttcaactcctaactccatcgaatactaaccctttgattttgggcatgtcacacaatttcagcttcaattattttctgtaaaatgagtattataattgtatctactttattcagttaatgtgaggatcgaatgggtgattcaagatgttgatgcatattctctaaaaagaggaattctccactcttaattgatatcaaaggtacgaaaaaataaataattctgccagtgcataacctcatctaaatgatagctgcctgaaaaataccagatagaatcctaaaatataaatttaggattatattttaaataatgtatacagtatctctttaaaatgctgcttctgctcgggggtaactttccagatgctgataggcaaggggtctggctgtggggcacaggcacttcagcctcctcccacagcctctgaatgatgaggcgcagacacacccagcagcatgcaaatgccttgccatctctataatcctgccctccatgtggggcatcttattctgttctggttgtcatagtaaaatgccacaaggtgggtagcctactaatgacaggactttatttctcaccatcgtgaagcctgggaagtccaaggtccaggcacaagcagattcagtgtccagtgagagggactttctgatttataaatggtgccttcttgctgtgtcctcacaagaatgaagagaaaagtagcattcttgcacctcttttaagggcactaatctcattgcaaatcacctaatcacctcccaaagaccccactcctaatatggtcaccttccaaagaccccactcctaacactgtcaccttccaaagaccccactcctaatatcatcacattggggaatagatttgaacattcggattttcgaaggaacacaaatatttagaccatagcatgagatgcccatgttagatttgtagccagactaaggcagcagggatgctggaaaagggatttcagtggaatctaggagcaaggtcgggcagccagcagtcttgaatcaccaccccgccacatccctgtggccttccacttctacaaaggagggctctaacctgggattcagccaacaggcttggaatctctccctctgacctcatattttgagttaaaggaggtcttcaatgtgaatgcagccctgtagatggggcagtcttgtgcagaagataatccgaatactgttatgtgatatgtctgaccagagcctcattatttactcagaaaaatggttatgctatttgatacggaagaagtgattgatagtgtagttgctttcggtaaataggaaggctgcaggttgatgatttcttagatacccatgagactgggttcacttctatagacataggacacaccattttattgtctaaagagcaaagaagtcctattatattgctgatttggctcatcctgattcagagcctagatgaggctgtacctccttgaactatgttcatatttcaggcatctgggtagatcttagtgaaaaggcagtggcacattttcttctctgatgacaacctcccctcttttcagctcttccaccccactactcttggtgaacctacttttacgtgcatcaaaatctttagtcgtccaaccactcctcctctccaattcattctatttggcctcctgatgcaaaaccactgtattaataaagttgctctaagccctttaaactaatttcatgacttattcttctactataactttcttaggtgttcttcttgcctcttgcacttaagaagcagaaaatcattaaagactgtggtaaaagtactgacgtgcttaaataaaacagttccagcccacctggtttattactgttcagagtcaagtaaacttctcattgttgagggactatcttcagcaaaaatttcaagttttttctgccctaagcaatccttctatagcatctgggtctgctcagcaacttacaactttctacaaataagattaacaacaacagaggactcctttcacctcacttgagaatttatctgtatcttctttgtgtctcagggaaagtaatgtctcttctcttctctttacttatcctcctaacttgccctctcctacctgcaccagtcattctgatcttccacacttcttcactttcttctcttgataaagttcatgcccagagattctgttctacctgattttcagtaagtccatttgatttgactattcctttttcctgggttttactcttaccttatacattatcaattttcctttccaaatcattttgctctttcttcaagatatgtgtacaatgatactgccctatcttccttgaaaataaaacagtatttccagccattattgaaaatacaacttcccagaccagttcctgaaggtgcagatgacaatgggtctagaatgaggcctaaaaatatgtatttctaacaagctccccccagatgcttctatcagtctttttcctccttcttactacagtttggacctgctattttcttgatgctacatctcctctctaactattgtcatatttgcctgctgtgctaaaatttcttgaaaaagaggtctattcttgctatatttaatttacctttcccttaaacctactccagtcagactttcagctccatcatgacactgaaactctttctgtcaatatcagctgtgatttccgtgtcaataaatcctacggcccttattcatttcttagcttttttgacatatcatacacatgtagatgttactccttctcattgaatacactttctcttcttgtctttcagagtgccaccgtattggtttttctactatccactgtttgccattcttgatctgcttagtgctttctctatgtctttttgatgttttaacattgcagagtcccaagactgcccctaaaccttttgtcatctctatctctactcattccttttgtaatgttatcaagttttgcaattttaaatattatctgtactatgatgactgctaagcttatatctctgaaacagcctactctcctgatctttgaattcgttatctaactccctgcttaacatccatcctgagtgcttaatagacattgcaaagctaacatgttcgaaaagtaactttatgttattacccttggtgctccctcagtatttcctatttcaataaatgactatcttctttttctagctatttaagcaaaaacaaacaaacaaacaaaaacaaaaaaaaacaaaaaactgggggtcatttttggcttctctttttctcatatttctcatagaatccatcagtatatgattttggctctatcttcaaaatacatccataattcaaccaattctcatcaccttcacttattgctattatcctggtgcaagtcaccattggctatcttctgaatttttgtactagtttcttaactggtctacctatgtcctctcttgtctcagtaaaatgcattgtcttctcaacagagcaacggagagatctttaaaagaggtgcaagaatctcgcgttatggtctgaatatgtgtgttcccttaaaaatctgtattttgaaatctaatccctgatgtgttggtattaggagtggggtctttggaaggtgattaggtgatttgtaatgacattagtgcccttaaaagaggcataagaattttacaaatcttatcttatatctatatattctgttcagtatagatctgttatatatctgagatatatatgcctgtgattatatatgatattatggtattatatatatatatatctcagatcatctcactgttcaaaacatgccaatagcccctaatctcagtgtaaaagccacgttctttactacggcctcaagatcctgcatgacccagctcctcttcacttctttgatcttacatcctctgacattcccctcacttactctgctgcagccacactggctttcttcctcattacttttctatcacaccagacacactgttagccacagggcttttgctggtttcctctgtcagatacagtttctctcccctccttggaaatttggcttaaaggtaagaggctgctcttgacactcattgaaacttccacctgccttccccttttctttcttttctactttttgtactccatagcacttattaccttccaatctaatacctattttacttatgtactttgtttcttttctggcattttgcacaagaatctcatctccatacagcagggattttatatatttttcaaagatgtagacacagtgtctatagttgtacctagcacatagcaggtttttaataaattgtagatgaataaatatcttgccttttacttggttttattgctgtttggttatgtgtatttttttcttttggaccataaacagtggtacctgtgtctaaacttttataatttcaaacctccctaaactgtacctggcatttaactagatgttcaataagcactaatcaaatgaatagaataaatttgcctgtgaagcaccattctacaaccaaattcaaaacagaatttagattctattattgttagtgtgatacttcaaatagttatctatattgagtaagtaaaaatttggcaaacatatattactttaaaatgaacagtacattaaatttcagttcactttatgtgattacaaaattgggcaggcacactttagaaatactactataaaatcatgcttataagagaaaggaaattttacatccaatatactaaatatttttaagcattttgaaataaaataatgtatgaaatataacaaagtagtttttccatataatttaaaatagtatataaaatataaaaatagaaaacatatctactataattgaacattaattttataggtttaagatttctgttgacataagaattatatatatgtacacacagatattcacacacatgttgtttcttgatatatatctttatttctagttatagtgataaataaaacaggagaaggtaaacctcttgtccaaaatctttgatggaattttttgtcctcctagtagaatccctatgtgactgattattttttcccatttttaaaatgaaatacttaatttaactaataagtctgtgtagataaatgctaaaggacgaacgctattacagcacatctttgatataactaaatgtttcgtttggtagaccttagaagactaacctttcatcttcaagaaagttaatttcaacaacaattgtatctcctatttaaaacttctcttccatagcttatttttttgttagtgagatatgtctttttcagaggaagaaactggatttattttatcattgtaacaaaatatttctcactcatccaacccgggagtctggaagagtgggagtctacccaatttacttacacctttgttcatagctgaaatttacattgggtggtcttattaatgttcaagagtagtggcaaggccaaatcataaacacattgtgcttatgtaaaacatcagaacgtaacagtagggtttcctaatgtcctaactgccatggtgtgtgttatatgtctataataaataggagcttactgtaagatgcagaagatatgttataaatccctacaatataagttgttaaattacttcaagttcttgccatagtttataagaatctaataaaatttgggtggcctgcatttcgtactatggccatgtgcttataaatgacccatatagacatagatgtattgggagatcctgatcaaagtgttaacagtgtacttgacatctcatcctatcatacttttttcacgatatgggaattatttctccaccatcgcttattcttttttgcatgtatggacatcgtgtaagactcaaagagcaatcagttagtactattaatcgctacatggccactgcacctctttagaggccctttcctgcatgtatctgctaggtgattttttgattttctctctgtatttatgcttcttcttactctggcaaggatttagttatatcaagatgaaacatattgtagggttaacaacacagacgcaggggttcaacagccagggtttgaatcccaaatagctctttcatttgttaagtgcataatctcaggaagtacagaacagagcaggtgggaaaagcacactgagagaatggggagaaagtttgggtcactgtatggctatgaagattgtaccccacttagctttgggaaggcagcactatgataaatataatgtgaatggtaaactgggagttgaacttgtaccacttctgcatcccacagtttatggacttcatactcaccaattggtttaaaaagtgtttggggtcattccttacacatgctcatagggataagaaagggaagccttgtaaaatgagatgacttgcaacaagaatgttaaaacagaatacttccgtcgtggaaaaataggagagggactatgtaaatttaatccatattgttagttgttaaaattgccttgtctcctaagaattagagagaaagaaaagcttcaaagaacagctgtgatgttggaagtttttgtggaaaaaaaaaaattggtgttctcaaatagctcatgtctttctgaaactctatatgagatttatgaaaaagataaagcataaattggagttaggtggattgaaaatacactaggaatttctgccaagtaaagcagtaaggaaatttcataacccctcattgttctggcttcattccctttaaatatatcaaaaaaacaatagatagccttcactttcagaagaaactaacttagagatagattgctttatttgtttggaatggcggtagttttagtgagtttaaatgttctttaaaatttttatataaattatgcatattagaaaatataatttttaaaaatttttgctgctgtttttacaatattggtgaaataatcttttttttcccttcaaggttttattagtccattttcccattgctgataaagacataactgagactggacaatttacaaaagaaagaggtttaatggactcagagtttcacatggctggggaggcctcacaatcatggtggaaggtaaaaagcacgtctcacgtggtggcagacaagagaagagagaacttgtgtagggaaactcctctatataaaactgtcagatcttgcgagacttattcactatcacaagaatagcacgggaaagacctgccctcatgatttaaatacctcccactgggttcctcccacaacatgtggaaattgtgggagctacaattcaagatgagatttgggtagggatacagccaaaccatatcataggggatgtccctctcctattaacattttttaaaattaagcccttagtgaatccactatcctgaagttcttccatcctactgttctcaaagcagacactaaaactaaggcttaaatgcaaatggtttattttggtctgtgattgggaattaaaggaaaaaggagtgaaggtaaccaggaggcactctggaattgagttgatgccactgtgaacaactgggcttggattctactgggcacttctgagatgctcttaaaaatgcacctcagaattgtctgctcaacttcactgcaggaagggaggattagctcttgggctccccttctccatttaataaattttgcctcaccgggcattagctccctcataagcccaagttgcacaagggccagaggtaaaaggcatacaatgcagctgaagtgaagtgccaccacataacacttgtgcaaaactggtggctgtggcaaaaattaaagaaaaggtgatccatgcagatgtgagcaggggacaagagtgtcttacatagcctgctatacttggagagaacagaaaatgtatcataatgctccagccatttcatttgagtctcatgctgaacaaacctgcttcctcagcacagtgaatgaactctcagctctgctatatttgctattttaatacttgagatatgcttcttctatggaagatccacatgtattgactctccctctataggatgaacacttacatattttgacagttaatgataggtgtcaacttggctggatcaaggaatgtctagaaacctggtacagacttcttctggggtctgtctgtgagggtgttttcccgagaagatttacatgtgagtttgagtggactaagcaggaagatctgccctcagtgtgggcaggcatcatccaatctactggggatccaaagagaacaaaaatagagaataggtgtatgtgtcaatctatctgctacaacaagaatacactctttctctcctgtccttggacaaatctgggctccccagcctttggacttaagatttgaactccaaaacttaagaccagtgtcctcccaggttctcacacctttggcctcagaccctgagttacaccatctgttttcctggttccaggcctttggacttagactgagtcaagctactggcatctcagggtctccagattgcaggtgacctgtcatgggacttctcagcctctataatcacataaaccaatcccctcataattcctgtctcatatatttctatctaatcctattgattctgtccctctggaaaaccctgactgtatcagtgttgatttataattttttaaaatagtcgcagaaattcatttgggagagtaatttttgatatcctcttaaaaagtagggaactgagatcaaataacttgtccaaagttcctttgtaactttgcccttagtgtcaatatagtcagccctccatatctgcatattcaaccaacactgaagtagctttattgagtacaaatgttccttttacattttttaagcacttggaagttctctgaaaaaaataaataaatctgctaaaaacacaaatttttattggcttaaagtaaattttggttttttgattacattttactaaaaaaagatgccaaaatatactaatcctgaaagaagatctgatgagagaaaaataaccaataaacttaagtctgcagccattctaagggcattctgctacttttacttccaagacaagaatgatttatcattaaatatagttgaaactttatggtcttatttggctgtttacctcactcacaaaaataactgccctatacatgactgtatttcattgtcctaatctggtttcatgttttttgttgttattatttagtgtaaaaactgaatgctaacccatgttcatatgtgcatttttaaaagctatacctgttgaaatgttggatattttcactagctctcttttagtcatattagcctgtaaaagtttattgaagactattcaattactgtacattgtttcctgcaaaaaaaagtattgaatttttttctgacctcccttactgagaataatgaagacctaggagaataaggtacttatatttcaaagtctcttaaagttattgcatttattttctttcacaaaacaaaagaaagcaggaaagcaaaacctagtttaaatgagttgttttaactaactacttcttgacagctaagaaaaatttcttcccagttgccttctttccaacgtacaccatctaattctttcatagacagtaagaacacatggagagtggggaagaatgtagcttgcagaatttagtgatttaattggtggccttctcaaggggtgctactggaatttaggcagtttctaccaaagtcacccaaaaccgaacttgaactggctgcatgaagttttcctacatgtttgtcatcaagagttcaagccgctgcagcacttagagacctgaccattctactgaagaaaagaaatactatagtaaactctagttggttgtgaaatgaatgttttcaattgctagaagctaatgataaaatttttctagtaatacattgatttttacatttacagatttccataggattgacaaagatgcctcttcatttttgagaaaagtcccttcattgcaatattttatgaaaagttctatgtgtaactatttggtacaaagtgtaaatttaggtcttcttaaaatgactctacccttaaataattttgttttcaagggtcacgtctcttgggtaatgactaacgttctcctagtgattagtaataacaattatgtagaatggtgattcttggtgactttctgtcccactgaatgaaacaacatatttcaaaatcaagactctgggacatttggttcttctaagtcacattttttccccagtatataaagtcaaatttttatgtaattttatataaatcacttttaaataaaaaaaattaataaaatatcaacaagaataattgcttattagtgtcttcttgaaatctctaaattaccatttgaaaattgtttttcaatgtttttggctatgtaatcattagaataaaaactacgtttctgtttaatcatttggacatctggaccaagcatctggaaattttagtcaattgttttttttccttgatccaatttttctgcagttgtttggtgcagtaaagatatcacgagtggaatacatcaagtttgcattcttatcactttctctacatctgttactgacatgattttcagccagcttctatgtaggcagaagccagtttctgggcctattttgaaaccttgagttagttatcgtggttaataaagagatgcaaaaagaaacttgctggacacagaaataataatagacttatagtgcactactttagtactatgctccagcctctatacgatgcaaggttggtaatgtactaagagctgttggctttgagattcattagctatttaatattggaaaaatcacttaaattttgtgagacttagttccaaaatctacaaaatataagggtaacagagtacattcttttttattgtggttaaaaacacgagatctactctcaacacatgtttgtgtgtggtacagtgttgtgaactataaacacaatgttgtgcagtagatctgaaaaactttttcatcttgagtactgaaaccttatacccattgagtagcaactcctcatttcccacagttcatttttaaagtctcttctacgtctgaatttcatttctgaaaatttcacatatatgtttcaaccaacattataatccaataatatttacttagttcatatatatatgttccttaatttgttttgagcaatactatatgatactgttcaaaaccaattaaagaacatgacttttcatagctagagatcttagatttctaacagctgattcttatttgagcaaacagaaaaaggtacaaatacagaactatatacttcttctactgaccaggagatgatgcagcaagctctttcccagcccaaaatgcatgcagcttatcacacttagctgcctgaactttttttttatggagatgggatctcacttgttgctcaggctgtagtgcagcagcttttcacagatgtgataacagagcattgaagcctcaaacccctggcctcaaacagtcctcccaactcagcctatcaagttgctaggactacaggcactcattgtgcctggctaagtgtctgaacattttgtctacaagaatattttttgcatacaagactggggcagaaaattaccattccacttctatttatttatggtaggataaaaagcacaaaattaaaagtttaggaaacacattgcaataatagattttctacacaggtaagaaatttcattaaagtacaatttaaaatatgtgaatagatcaaaataataaacttatgttgaaatcaaccagaacaccttcagatacttgacattatttttttaataattagaggaaggcacaaacacactctctgtttttctttctttttacatacaaatacacacacatacacacacacaattggagcacagctaagtgtccattagtgctcattttctacttttattttcctctgtaaatttcctctgctatctcaggattctttaatttagcaaagtgatgtctttggagcaacactcaagtgctcctccatttaaatttgaattctgactcagccatgtcctaactatgtgaccactataaaagtcattttgtctctctgtaaaatgtggatggtgatgactaggttgttacaaaggtaaatgagttagtaaatatttagtgcttagaacagtgtctagccttcaggaagtgctcaacaaatgttagtgttttttagtatgatgttagacacccctcagtaggacaggacaaattttggaagaggaaggtaaaagaatgctccgttataatgagtaccgtaaaagtcccctcttatccacagtttcactttctaagatttcagttattggcggtcaaccacgatcctaagttattaaacagataatttcagaaataaactatttctaagtttcaattgtgtgctattctgcggagcattagggaaactcatactattctgcttcttcccagccttcttgcctgggatgtgaatcatccttttgtccagcgcttcagcactgtagacactacccaccccttagtcacttagtaactatctaggttccactagctgcaatccatggtgatatcacagagtttatgttcgagtagcccttatttgacttaatcatggccccaaaacacaaaggtagtaattctggcaatttgtatatgccaaagacaagctgtaaaatttctcctttaagcaaaaaggtgaaagttcttaacttagtaaggaagaaaaaaacattgtatgctgaacttgctagacctactgcaaagacaaatctaaccgcaagatggtgaagaaggaaaaagaaatttgtgccagttttggtgttgcacatcaaactagaacaattacagccacaatgcatgacaaaggcttagttaagatagaaaaaggattaaatttttagttggaaggcatgaactgatacttgtgcaaattgatgggaattgggttcagtactatccatgctttcaggcatccactggagctttggatcatatccttggtgaataagcggggactactgtaatgaggatagacagctctactaggtggcaaactttggatgttttcagttaccctcatattttatacatttggaaaatgaggtccagagaatttaagcaactttctgttattaaatgcttaattaatcccaaattctaaaacacacattttaaaatataaaagtcataatataataattcagcacttaagtcttcaaatattgtgaggaatgctaatggttgaaaccagaaccctctaggagttgagattgaggttactttaaagtttcaggctctgtctcaatggtttgcctcatgcaagtgggtccagtgtacagaattacattaaaaagactccaatttttgaaaagaagatgataaactaatgtaagttttctgtccacatattgcaaatagaagcaagaaagaaaaagaggctaggcagaaaaaccaagagaggtcatcaattttgtgagcttagctatgacttagtgacttagttcacaaagtgaaagtactgaaaaaaaaaaaagccttcagaagcgagaccaacattgtcatctagtcctataccttgatactgaatcttattataatacagttgaccattgaacaacatggggttgacctacacaagttcacttacacatggatttatttttcaataaaagttatatgtgtgcctgcttcttctgcctccccttccacctcctccacctcttctgcctctaccttccgagacagcaagacaaacccttcttctctctcctcctcctcagcctattcaatgtgaagacaagatgaagacctttatgaggatccacttccatttaataaatggaatgacttaagacttttatcttctttatgatttttctaatagcatttgcttttctatagcctactttagcctatcttgccttaactctttgagactacgtagtcttttggtgctgcttccctctgtaacgcatcatttcttgtgctccttttgagccagattttggattcatttgcaaatcacctagcatggctgaactaaaaggatgctattattttctgaatctacatgagctgccagatctactgctcacaaataaagtactatgggctctctgttcagaactgatttgctcaggtagatcagacgattaacccagttccattaaccattacaagggtggatctcctcggatatgtggatacagaaaagaagccttccatgctgggggggcaatttgtagtggtgggtcatcagaggagcaggaattcctaaataaatataccgtatatcttctcttctagccactgaacagcactgagagaataaatggcccagccctgacttttgggttcccatagcaatgtgtttatgttcttactttggtcatagcactaaccataacatattatgctcatgtatttatcacactgtcatcccaagcaatttgtgaactcctcgacaccaaggattgagtcctatttattcttgtactcctggcagatctcacagtgttttttacatagtagatcctcaaaatgtgatgttgacctaattttccatggtgagtcattgaatcaattataacactcagtgaactgtttagatggaaaagaacttccatgtgatgtaaggggtcaaatgtaggtagggaagctgcagattatttatagtatcacatttgatgcagcttagaacagaaatcatgacttttcactttatcctcagagtcactttgctgagaaggcataaagtggccaggattgatagttttacaacatgataatcagccagggtttacaaggcactctgcacaactctgaaatacgctgccatttttattctctcctgcaggatgtacattgcacatactaaaggcactgagttacagggcactctttcagtttgtttctactagaagtttccaaatgagtttgagcatagactctctctctataccaaacactacctcttgccctcataagaaattagcattgtacaaaacacatttttcaagatggtggttctaagtcattggtcaaaaccacattggcatatggggatcagaagaaaacagtgccaaaagaataagaagaccagctgggcgcggtggctcacgcctgtaatcccagccctttgggaggccgaggcaggctgatcacaaggtcaggagatggagaccatcctggctaacacggtgaaaccccgcctctactaaaaatacaaaaaaattagccaggtgtggtggtgggcgcctgtagtcccagctgctcgggaggctaaggcaggagaaaggcgtgaatccgggagggggagctcgcagtgagccgagatcgcgccactgcactccagcctgggtgacagagtgagactccatctcaaaaaaaaaaaaaaagaataagaagaccacaggagctggaaacctcacagagactcaagaaccaggaatctatgagcatgagaagtggatgacagaacccaatcaaggagtatgcagcccaaacctttgttggggtgatgttgcagttttgtaaagacagtcactaatgcacagggatctgcaggtaaaatctggggggaacattttagtaaaaacgtaaaggtataaaggacatttgctgatacccaagtcaactgggtgactctcttatttacagatctttgggacatgaattgctccatatctaggcctgcatacacaaatagatatgctcttattagaaatgtattggtgcaggccaagcgtggtggctcacacctgtaatcccagcactttgggaggctgaggcgggtggataacttgagcttaggaattcaagaccagcctggccaacatgggggaaacccacctctactaaaaatacaaaaaaattagccgggcatggtggcacatgcctgtagtcccagatacttgggaggctgaggcacgagaattgtttgaacccaggaggtggaggttgcagtgaggcaaagatcatgccactgtgctccagcctcagctatagagtaagaccctgtcttgtctcaaaaaagaaaggaaaaagaaatgtattatgtgcaaagcattacacaagacatttggagaaatgcataagcacattcttacaggtcattttggtagaccacaaatatatgtttgaaaaaaaatcaaagaaataattcatcccaatgtatgggaagtgacaaattagaagcagaataaataggggcattgaaagttcagagatgggagggaggaatcactgtggcccatgactttctgagaatgatttaccagggaagatgggttttatttagaatccaaaggctgggtaaaattttggtaatcggcaaggaaagaggaggacattttagtgctggtgattaatgtgagtaaaggtagagatgctaggctgtgtaagaagtgtttgtgatcaggatgacggaaatttttaaaaatgtttcaaatttaaaaaataaaaagggtagagggagtaacgtccagactgctgtgggtgaaaccttgattctatcctacagaaagaggaactattaaatatttttgaaaaataaaaatgtaacaggacaaaaatggtggataaaaatcaatgggtagtaatgtggatcacaggttacataaaagagaggacctaaatgaagtgattttaaaaataaacagctctttgtgccttatttatattttttcaagtcaaaatcttcagagaaaaagccaaatgaaaaggacaaagcaggaaagtatttcttgagatgtacttatagaacccaataggtatttaaaaagaaaaagaaaaagaaaaaaaaaaaaagaaatgtatttataatgtcaaggtagtaaaatccagcagaaagatgagagaacaaatgtttggctcaatcagcattaagggacgtggattagggagtatctagaataaacctaatcttactctggtaaacccttaaagtggttttaattttccaggtagattcagagtacagcaagcaaatagagactgaacctcgaggaacactgacagtttggaggtagagattcataacaagctttaccctccaaagcagtttgaactctttcaaagatatctcatgatccgatttcttgactgcaactcttattattgtttctatttttctacaggggcgcgtctttcaactcttctatgtgtctggtctaatccacctttcctttggcctctcatctcaagatactctcagcgtcttcttataatttcttgtcaaattagcacattctcttttttttcccctcctaagtagtttcctcctcactcatccctgaagtaggcttttcatcaattagttttttttgtttatagtacagacatggaatacttagtaatgtcccaagagtactctcatctcagctaagcatggtgtatttacaatactcctacaattggaagcaaagatggtttcatctcaggactaaacattagttacttttaatgcatctgtttcatttttactttaaaagaggtaatattactgtaattacattaaatgtctactttaataccatgcctttaaaagcaagacaaattaaaattcctttctttctagaacaagaattgatatgtcgctcctgctgataagagaagctctctagggagtatggaggcaagaaacgcttgatagtcagagaagcttattggagaaagattctagccttctgtaaaatataaaaatcatgtgagacaaaaagccaaaagatttttaggaaaatggaaaaggtacattaatgaaataatgctgaaactttacttcattaagtttattcatttattcctcatctttcccacctctacctacagccacaaatagcttttcaaattttgcccaaaaccagtttgcaatatttatcaggcgaatttaattttcattgtttccaaatacagcactcaaaaaatcccacaaaaggttgtactgaacaatcaacctctaaaaggaaaaacaaaatccatacctgttataaatgtctttctctatacctggacatttttgctattatcttgaattttctaagaaatgtattcagttctctagaactagaacaccaattcacatccactgatatacttccactgggtttgttcttcatttgctatatagatagtatgagatactcatgatgttaacccttttaaacaccaccaaccacaaaaaaatggtacccatgtacttttggagaatggacaataatccttataatgggattcagtatgtaaaatttagaaatatcgcacttttggcaatctttgtatatcccaaaatacaaagcactgctagtaaaagcaattttcaatagcggagacatttgtcttttgaatataaatcaccaaatcatttgtgacatctaggcagttttatttgttcagatatcaatctatatgtgaatactgagtgtggaagggttgcttataaagttgataataaaagcaataatgggtagactgacaatattttgataatgtcaccaaaatctggtgctatatggtttgaattttatgtgacatgtaaagaatgtggtcatcaaaacaaggatagaaaaggatatgacgtttccctgcccctacctcattatgaaaaagtagtcttacattttagaaaagataaatgtattaatatgttacacttcaaatgttgttctctgctgcgcagcgaaatttgatcaggaagctgccaataataaattccggttgacaaatagcaaattctaccgggctgaaacaaaactcagttctgaaaatcgtcagagaaatctttgtgagttgtagaaaactacgtaagtttaaattcagaaatactgatttccacaataattaattctgctttattcaaaagaaccaatatttattagactatagcaggttttttgatgtagagtttaatactatggcaaatttacctgagtactctttttgtatttgctatttaatatatacaattttataaatcagaagaccttatttatagttctataaaatctatcatatcgtatcttttttctttcaagaaatatataagattgatatttcttcctttcttctcattttttgtcatgacaacttttccagatacaatgccatgtgagcattcccaacctgcttaactgatgggaagagataaaattttttaaaatgtttgggcaaaatctgggtcaatttctactttcaaataaatcactacaacaacttttatttactaaaatgtagcatatgctagttattttagaaaatttacgacaatgttatatagctagttaatttcaaaattaagattcaaaatatttatgttctttcatgaattacaggaactaagtagcaattgcttacagagaaaaataatgtaacaaaatttatcgccactaattttgaaaccctgtgtgggctcctgccctagcccacactctttctccttcattcagaggtaaatacaattctaaataatgtgttcatccttcttttttcctttgttttgcttttatcacgtatgttagattccctaagccaaatgatatttagttttcaaagccttgtactttatacaggtaggattttgtctgcattatcctgtgatttgatcttttgtttaagcattatgatcctgggattcatttatgttatcttgtgtgtactttattaagttttcaggcctggattatattccattccatgcatatacatcaagatatttgtttactccattgtggatgaatttgggtttctttccaagatttttcttttaagaacagtgttattgtgaatattcctatacatgttttctgattcacagatatagattctctaggacattggattttatacttttgactataaaatgcattttattcaacaaccctatctaaacatattgtatagtgtataggaatgagttatgtatgtgtttgtaaaactaaaaccaaaataatataaaatataccattaaaatttctattctacctactctattctacttagttctatttaattaaaacaaacaaacaaatgaacaaaaacaacaacaacaaccatgctggtcttgagccactggaaatcttgagccgacactaagttgtaacctttggtttcaacacattgctctgtgatatatttggctgctttaaggtatattgaagagtggaattaggaggcttagcatattttaggccggataagttacacaagtggtggtaaaacaatcacccaaacatattggagtcctcactgtagtaacttttacatctcaacactcatgtaacctctgctacaggaaaggagtggcgcttatatccacatagacacagacccagatttaccatgggtcctccagggacaagatagacccatgggttgtgcatttttgtgactaatgtttcttttgctcaccgctcagtaagtaaaatctagcaggaaatgtggcctatcagatgaatatctggtgaatgctactgtctttgccacagagggtatgtgtttcttcaacttaatagtattaaactgttctccaaatgattgtatcaatttacactttcattagcagtatatacttatactgggagctccacattgtcacacatacttgcattggcaggatatttaatgtttaataggtatgaaatcctaactcattgtgatattaatttctactaccttataaatgagtttgatcgtctttttatatgtttctgggtcaatttcctttctttctttgttaaatgcctttctttctctgctgaaggcattctttgctattttatctcagattatttgtcattttcctgtttggtctattagtgttattatatattcattattctttttgtattctttatgtattattagttgtaagtggtgcaaataatttctttcccttttcattttttacagtacttttgtataaaatggatgtagttgaattgatcagtcttttactttatgtatactttttggctcttgtctaaaaatgctttcctttcttatgttgcacagtgattttaaaaataatttccgctaaaagtttttccttctatataaaagagcttattttcatgtatggtatggggaagaataaattcaggaagtttaatataccaaataaatgggcagggattagtaatatggaaaaagaacagaatagagactccagaaataaattattgcatataagaatattttaatttgtaaaaccagaggcagtttatatcatagaggaaatggtgagcttgtcattaaatggtgtgggacaattgttcatccatgtggaaaaatattgacatctatctgtattaatctgtttacgtgcatttgtatctatgtctaaacatattctatatttatattatgcttgcacaccttcccccatcatacataataatatgctctttatatttttatgttatgaaattttaaatttttactcatacacattaatcctggaatatagagacagatttgactttggtatattaatgttgtatctagaaaatttgataaactcattaattttaacatttatgatcattttaaagggttttctatacatagagtaatgttatctaagaagagtaacagattacctctttattttcatatctttaatttccttaatggcaccataagcagtgaagttgtatactgtcccatgtatacttgaccagaatacatattctgaagttaatggttcagaattatatataaactcaatcaatctagcatttcatttgtatgaagctgacataagttttcctctctactctcattgttactattgaatcctcacaatgttaagaggtagattgggctgttatactctcaggcttagagaagttgaataacttgacttaggccaaacacttagtaagtggaagatgatcacaggtttctgtctccaattgccgtgcaattaacctatatgctactctggcaactctaactgaaaaaaggtaagtttactccaggataaaaccagtgaaaaacagcaatctttttattaaaccatattcttgtctagtctcttctacagagtgaccttgaaagcaatctcagtgttttctagggcaaactaaattgatgacactttttgataaagtcccagaatcatcttattgacaaccacattacacattcaagttattaccctattgcatatccacattaaagatattcaatttggtgattagcggttcaacttaacaaattagctaaattccttcctttttctatttttcttgataatataaatacaaactctgagatgtcccctggtctctggaaaggtgtaatttaaatgacagctgagttttgtatcacaaaagaactcaaatagagaaacgattcgtaatggattttatcactttgttaatcatttaaagctaccttgcatgacagagacagataactcttcactctttagccatttaatatatgaagatattaaacctcttgagtattcttgatggaatacatcagacgatatttattttcttactgggcaagcactctagtatattaaagaagaagaagctgttattcaaccgaagttttaactagactgactctggggctcataatggtaatccacaatttgccaagatatttattctattccatttgagcagcagcatggtttaatgagaaacattgctctttcctatggcttctgtagcactgtaattttaccacattatttgtattatgggatatttgattgtcatttctaatccttcattcttcccaatatcattctctttgccatgtgactttatatttcctctcactagtagtggagtatatttccccgccccattgacgctgaattttgccatgtgattttctttggtcactgtcatacgagtaaaaatgactgtggcagttccaaatctagacttttaacagcattgcccatttatgcatacccctcttgcatttctgccatcgtaattagaagaatatgccttggcaaatccgttgatccaaggaagattagagacacatgtaatacagccccagtcttcagcttgattccaagggtagccaaattcagctccttaatcagccagcttccagctgacctgcaagcacacgaacttgaacaagtgattgttgtaagccactagtttttagggagtttttctcttccaagacattattgctgcaattggtggtttatgtacatacgttcaagaaatgccttcaaaactcttgtatgttagacactaacctagatgttgattaaatagtagatgaaagaatagtgatatatgttctcataaactaccatttagagagtgatagagacaagttgatggataataaaatataatatgggtaaatgttttgatcagagcatggtgttgtgggaatatatgagcctggtgcctcatttatacctgtgggtttgccttaactctccataagaagtcatgactatgtcaacagtgggactggtaaaaactgtataaaggaatgacatttactccaaatagagttagcagtgtgagtgatcagagggcatagagtactcgatgagctggaaggagatgagattggctatagtgaatgttggaggaagagtggagggagaagcttgtaatgtatgtgctttagctaatgcaacaccatggtaactattatagtgtttggacttgactcaagagcaatggtactggtggtgttgttaggagggaattctagttttcctttactacacctgttattatttagttgtctttcccatgagaagatgagaatatcggtatcctcagtgccagacaaattgctttttcctggagcatacatttaatgcattcaatgtgtaaaatggcatttaacacactgaatgcattacagatttatatgtgccagtttcagtttctgggaggcaaatggggatgtgaacaaaacaaatggttagtcatgtttcatataagtttaggatcaacttattagatcatcttgaatgcctttccctgccaattcaggatgaattaaactctggcctagccatttcccagtggtttgtctagcctaattttaaaataatcaaacgaagggacttaaattagctggggaaattattccatgctttaatagattttgatgctaggaatgtttttctgacagtctaaccaaattttccttccacgattttatcccattacttttagttccgatttaaaaccatctgaatactctcttttccttttaagtagtcacacaatcacctaatgttaatatcagtggttttctttccttcatttgccagacccttgttttttcacacatattgaagttacatttttttctctagatttattagcttacatattttggtccattttactctatttttcatccgggctttaacacttatatcctgtttatatcatcttccccagtagtatttgtatcatgtccccgatgaggataattagtgagctgtttgttctcctttcaaagccatgaatagagatgttctgtaaaatgaagctcttacgctgatcttcacttggtccgctgggagacttcctcacagctatgcactctgcccttatcatgagttgttttttacatttcttccagttttcaaaatatgttagtagcaaaacatgcaaatctactgaaaattgtcaaatatgtgcttgcgatgtgttcaacaaaagagaaccaattaaaatatgtttttgatttagacactacagagtacagagtcttagtactcaggatctgtagttaaggttccttccaagagacaataacttcatgacaaattgcacactcagcaaagctgtcgagactgggtcttggcagtttttgtccatggtgggaagtgttagcagagctttgacttttcgcagcgcttggcgtattgagttgaagcaggagattttcagggaagtgtttttcatgtctggctactctcgatttggaagaagcattaattctagggtgatcaactcctttgccatgccctaacattagcattgttggctactctttggttctaaagaacattttccaaaattgttttttttttttttgtatggtcttgttaaaaaaagaatgttacgtggaaatgtaaagatggaaacgggggaggaaatgaacatagaggatgagcaaatattgaactattaggcatacacacaaatatttccctctctatatacaaagacactttcccaaaatgttagaaatggagaaaatctctagttctgaattaggcaattgtgttaaatacagtgtcttctgcccaaaagaacatacactccagatataaccagtggaggacacactaaggaagatctacacgttttgaaaggctgcatgaatcatttttcttctgtctcaggacaacccagttggggcacgtctagtgttactcccaattctgagatcaggaaaattaggattagatagttggactgacttgtcaaagggccacctatgagtaaatgctgcaactgaattctaactcagggttgtcagatagctgagccaggttttaaatgccatatatactgcacttaaatgaggtaatcaacgtaaaatatcatgcctgacaaatagtacaagcttcttatccattgactgttattactaatctggatgaatagtgtgacttattgcttctaaaccaaatccaagatttttgaaacagtagctgttgccaaaatgctatgagaaaactcttctaagagatccccatgtgctgatatgaaaaaaatatattttctgcaaaaataagtttattttcttttagttaaacacaaataaaaacttgaaaaagtgttatagtgactttttggtaatcttgctttgccgttaattagctttgtgagatctttgagttaattcttctagcttcagttgttttattgtaaaatgaaggtactatgagaagttataaaatgagaggattcaaatgaaagtaccctgaggatgacacagcactgcagagatgcatatgaatactattactactgttactaccctcaatttcccatctagaccgttaggagttgaatggtggccctgaaaaaggtaagtccacatcctaatgcctggaacctgtgaatgctgcctcatttggaagaggaggtttcacagaggtaatcaaattaaagatttggatatgaggagatttaaggtgcatgatctgggtggaccctaaatctaatgacaaatgtccttaaagagacatatagaaaagacacacacagaggagaaggttatgtgaagacagaatcagagcttagactagtctacaagtccaggaatgtcaacaaccagcagaaactgtaagaggttttcctagaacccccagaggaagcaggtccctgacgttatcttaatttcagactcttcatctccacagttctgaaagaataaatttctgttgttttacgccagctagtttgtggtagcctcatgaaaccaaaaataaataaataaataaataaataaataaataaataaataaaacaaaaaaaccccacaaaaatggtatgattctaatgctttaatgtatttaatttaacttgagcttctaacttatccattaaaatgacaagtttaaatggatcattcttaaattcctttctaagggcaataacagttaattagatgtaagttttcttaccagtgtgttttgaaaatgtacccagtttagaagataaagaaagaaacttgggatattaaagaggaaggttaaaaatgcgcagggtaccgaagctggtggtgtttaaggaaagcacgaaggtagaaaatagaacagtcctgatctccaggtattcttcaggaaaaaaaaaaattaaaagctatattgactctagataattaacacattttgtatatcttacctcaataatttaggtttacattgaaggtatcttttttatggcaaatgttcctattttttgagacaagaaataaagtgcatatatgaaaaaaaattcataacgaattcaaaaattcatgttttgagaggcagttttcaagtttaaattataatggaactactttcatatatatcttagaagtaaaattatgcatatcatatttccacatttgattaaggttttctgtgaagtagacagcttttagactatttactaatttagcagtagcattttattgattaataaacatttttagttgatcagcaggatgtagaacttaacttattgtaaagtattttatttagatagaatacttttttttacattggattaacacaaattgggtaaaaattgctttccctgttaatttaaattagctctaaaatgctaatccagtcgtttaattattcgactcctagccaaattgtttttgtgtttttaaagttttcagtgtgtgacatgaaagcaaaacagaagaaaacaaagcccaaaccacaagcctgttaaaagttatttcagatgactcaagaagccagggattagagaattctatgtacaagtcctattcactatgctctgtttctatcttgaaaagatgtgaaaaccctaagacaacatttagaatagtagttgcttaagactgaaattaatttcagttgcctatactcaaaatatactattagaatgccaaatttttgtgtattaaacttttttcttttttaaaaacatagccatgtttattacctaagcaacatctactgctttcggattccatgagtgatggataatagatatgttaacagaggattattttgattgatagacagattcattcattaatttataaacactttacacgtgtatttactgaacatatgttatgttctaaatacttatctaggagctaaacatacaatggtgacaaaattggtgaagattttcaagtggcttccattgcagcagaggtggccacacgttaaaagataagcaaattatcatgaaggcaatgacagataaagtgataggaagtgttgatggtaaagaggcaggaaagcataacagcaggtggggtgggaaatgtagctggggtcagatcagggcctctgggccaggggaacatgcattcatgttgaatgtattaaccttggtgagattctgaagcctaaacataaactaccacgtattatgattgatttctctgaagtcaccccattgcatgtggtgtcagccccacagaaagattattttgattgcaagggtaaatggggactagaaattaaaaggaaagatatcaaagaagaagacattctaccaaccttcaccagaatatgtactttacctttattgtctctgtagggttcaagtaaacaatttgatttttcaattacgtttggtgagagtttagtgattttttttttccggtcatgtcactggttttgtagcatgtggctatttattgattaaatcaataagtcaatcaacagatagccagtttcagttagttaatttgttgatttaatcaataaatagccacatgttacagaaactgcaactggcctgtaaagctctcttgataaacacttaatggtcctcatactgccttaaagggaccactggaatgggatttagtttgtgttcactctgtcaggtcagttgactcttttcccttttagggaggaatggctttgaattggcctttttgggctttaaaaggaaaggcatcaagggagtctcctgagtctgcggagacagagttggtgagtaagtagatggtaatatatactataggcaccttctgagagggctcttggtgattctgctactgggagtcaggcgtccatacccttgagtatggactagactcagactcatttacaatgaacaggaaatagtaaaggtgatgagatgttgcttctgaggttaggttagggcaatcattactcatatcttgtaaattcatttatcaaatgttttcatagctcatatctaggtaaatcagttcagcaggagggtgggcattcttcagggtgtaggaaagctctatttctttgctttgctgagcacagaaatggcttggccacacctatctttcctgtcaacatacattcaaccatgtgctatgcacacgtacacacatgtgcatgcacacacacatacatgcctacactactttcagaggtaaaactagaaaattctcagaacatacaaagaatcttctggccaacactacacattctaggaggtagtaggtagtagaaaaataccacctccatttatataaggcagcatcagaggtgtgatttgtgaggccatcagagacaactagaaagtgatctgtaagcaagaaaatagcaactcatgactgttgtttctaatagcactagaagagcaagtattggaattgtccctaatgacatggatatttcaagataaatatttgaaagcaatactatgacgaccctttggccaccaaacagttttactcaactctcatcttcttacattggaggaaaacaatcataccttaaaagagctgtttaccttagctcttctgtgattcacagcaacccaatttgaaattatataggggaagctaaataaattaacttctggcttctgtctatattttatctaaaagtggtccatattttttggcttcctaattctaaaggcataacattcatcagtattatatttgaatatgaattttctcaatgaataattcaaagataaaaaatttacaggtgaaaccttaatctaggtttttttttatttgtcattcaaaggaaatttaattctctcagtaagaataaaagattatttaatagccactgttcaaggtggagatatgtgcccttattctcagcctgattacaatctaattagagacaaaaagcaaagaaggcatactcaacaataagtatcataactaagggaacaaacagggatcacaggaattgactgaatgctggtattattcccagctgtggaaattaggaaactattaataggttacgtgctgcaattggaaacggataattaaaagaagagcacatttcaacaagtattaagaaggggacatttttagtcagagagaagaatgtgaattgaaggtaagcatgcagtatttggcttacctgggtgacagtacactgatatggtaggagtcaggccacagaagataacgtgtgcctcctgaaggggtatggaatctgtctggggaagagacagattttagtgttagcaacgtggagcatggattaaaggtgtggaaagtcagagacctgttaagaggctattatgatataccttctgaggaatgataagaacctagactaaagcagtgaaaagagaagcagagagtgaatagaatgaatgtgaaagatattagacaaaagtaataacatgattggctgggtagtttttgttgttgttgttctttttttgagacagtgtctcactctgtcatccaggctggagtgcagtggcctgatcacagctcactgcaacctgcacctcccaggctcaaatgatcctcccaccttagcctcccaggtagctgggactacaggcatgtgccaccacagctaattcttatttttttattattttttttttctgtagagatggggttttgccatgttgtcctggctggtctcaaactcctgagctcaagcaatgctcccacctcagcatcccaaagtgttgggattacaggtgagagcctgtgtccggctggctgaatgatttatgtaaggagagatgagacataacgcagatgtcttagggtattatattgatgatgatattgacaaccaagacagaaaaataggagagaggaatatttaagcaaaaagttaatcagaaaaattttgaatattttgaagtatctttagaatttttacatgaaattattgcagtagattgatgcctttatgtctctaaaactatagagacgtatgagataaaaatatagatgtggaagtcattgtcatatgctacattcgtggtagatgaacagttacagagagaagaaggctgagaatatgttattaacttcaaatagaaagtgaaggagataggaaatacatctgctatgtggtaggttttttattttattggacacaagagcagagagataggatgagccagagtaatacaagttaatggaatcaataaaaagaagctttgggaaagaacagtaatataaaatgccacagagagggcaaagaggagcatgaatgagaaaatgctgttaagcttgatcagaggtaactttcaatagactggtttcagtggtgagatggtggtgagaaaaatgaaggagactcaaactgcataggcttacaaagacagtatttggttaaagtgtaggcaggaagcactggcttaattcaacaagtttataggtgaaaacaaaagagataggcttaagagaaaggtagttagaggacatggaaattgagcatgtttatgggtaatagagtataaaaccagtagagagaccgaaaagacaagacagaatctgtaattgacatagaacattattcaagcaggaatgtgttaaggggaaatatatagacacttgatctgtggcatttataaaagggagagtcttcctccaaacaagctaaagtgagggaagaaaaaagtcctaagaaaatacaaagaaactctaaggagaggagggaagtgaagagatcatatgccaggtggtcttgataatttcagagaattttcgctgagatcatttgttcatctgttgaaatttatgctcctggggagggttggagatttcaagatgttgaaaaaagtttggatcggttgctatagggagtgaaatacagagtcaacagtgaagtttgaatcactctcatttctaataaaatcagtaagttgaaaccactttttttcctccagccatgcacatttgtacagataggagcaaagaaaacagataatgagaatttcccagggctggaattggggaaaagaagggtggaccctgcaggaggcattacagatacattgcaagagggttcttaaactgtttgaataagaagttgcaaactgggttgaaagaaaagtgaaatcaaattggcaccagggacgactacagcatggagagatcaaaggcacaaggatcacagcaaaaacacaaatcaggttctgcatgggttatgaaagagcaggtggtattcaggttgaagcagtggccagaatctgaggacgtgaagagaagcggtttctggagacagctagggtgtggacatgttagtaaaggcttgagttggagcggggatggaggccactggagttcaataattttaaaaagtgtgaggccacggtgtgagagtgatgacaagaaagggagagaagggtattgtaaacgaggtgactaagccagtaaggaaattttcctgagagttctctacgtaagaaagagagagtgagagagagagacagagagaaagaggagattagctatttaattatttccattgacatggggattgttttctggggaattattagccatatacattgtcagttttggttgctatgctaggccaaagttgagtccatgggttttacatcaatttagtcataatcaaagtgccttatggaaatgtaggatcataacttgaagcacacaataaccaccagagccaatctagactgagtcttgtgtttaccttttggggcctcaattttagatagactttacacattgaaacagatccagtaaagagcaaacagtgtagcagagagaactcaaagccattatgatactagtaggctggaggaggtccccaaatgccagctggacctcaatctcagctggtatccaggttcttgaccctgtcacgggaaataatgcaaggacaagttggaaaatagtgaaagaacggagatttaatattacaaagtgaaaagtatacactcaaggaaacggagtgcaggtgtactccagagtgtcacaccagaggctttgaggtttctacctttatgggtttctttaaccaaggggtggaatattcacgatggcccctggacaaaggttaagatttcttggaactgtggtgccacccgtttttacactaaatatggttgttctcagaactatcatgacgctggtgggtgtatgacttagtatgttaatgagtgtataatgaggtcctaggtgagacttaggtcaaatccagtgcatgttgggtccagttggccttagccagattggttcatcctctgttttgttcagggtcttgtcagcccctagcttatgcaactatttcaatagtttccttttgctagtcgtgtgaaattgctgcctggaattttctattctcctgcaaccaccctgtcttcttcctgtctcaattatcatattggggatgtaatttttgagcaatgaaaagattcaagggtgatacatttctcaagttcaatctttccagtaaaaatataaatttgacttagcaattgtgactctggaggctggaactaggaccaatggatggaaattattgagaggcaaattttgacttaattcgaggaaaaaaaaattgtttcttcttaaagcaacgagtcccatgccatgaaaagtgttcataatagactagtgagacaattcttgcatacactgaagtccacatggacacaattggcattgttttggaacttgttatgaatgcagaatctcaactgccatgccgaacctacattttaacaacatcctcagtcctgaagatgccatctatggtaaagcattgatctagaagactttcctccattgggtacacagttgggctacacagcctatagtctcttcctgttctgtgatttctgtcatgtattctgattttaaaagcaattctgtccttccttagtttgtctctgtcttttaaaatttcaaacactaagtgaaaaagcctagtgaacttttaatcttcatgttaagtttaattttatgagattattttcgtatgacatcactacttaaatcatctacatagtaaaaacttcaaagtgcaactttttgaaaatagctttgtgattcatgaatggtataattgaaatattgttttaacagtacttcaaaaccaacaaaaacaatactatctgcaaaatgtatgtaacactctccctgtaccacagccctttcttataattcactgttgactcatggagaatcactgtagattttgtttttcttcactaataatttactgtagctggcttgtgaaaaccgcatagggaagaagaattgttgctttcttgctatgtcttgcttttactttagtacctccatttaaaagcaagttaactgtctcctattttaattactcagctttctctaaggtcttggaatttttcttctgagacaactcaagccttgttttacttttaaatgcctgctgaaagtaacagtgatttgtttatcaacagagtaaagaattgataagctatggtagtaattatttttatttttttgtttagaaagcacattccttgagttttcctccaaatggaaagaatttttaattggcataaatatgatacagctcccttgtaactgagaaacatcatagaaatgaatagggctttgagtaaaacaatgtttctcatgacctgatattgttttgtttgtgtgtgcaacaactgggctttataaaaaattctactgtcagcagtggtacatcacagtttacaatctctcccttccaaagggagtactatcactacttagaaaagtagctgatttatggcaagaggcaacaaataagaaatcatggtttttatagtgaaagaaagatagagtttagtgtaaagtttctcttatttgaattggagaaagatttgctatttgtgatgaacaatatacttggcaatataactgaagacttgctaagtcaaatagtctattgtctcatgacaactacattgtggacaaaaaaaacatgtaaaacatgtttctccttgctttgcaaattctttaataacacttttacatgtgaggcccaaatatgagagtgatatcaaacagtttacatttgtgttcaagtgataacctcaaatcctactaattagtatatttttttaatttaccacttatccactgtgttcctttcctttctgttcctactgacatatctttaaagtatctatttatttaaataagcttagtcctctatttgaaaactatgaaaaaaaatcaacataaacttttcagcagcatggaagactattttttaatttttgaaaacaaaaacatgttttaaaatcttgctgctcaaatggtattcctttggggtcctggaagtttaaggtattttctcatttgtttacaaattacaaatttacaaattttctcttaagtgaaacaacttcttgcaatcttttcttatgcaattcttgggatttgcaacatgacccttttctttagccaatccactttttcagacttgtctccttccctccctctcccttgagtcactagtcctggagcttcttgaggttgctgaatcaccacttatctgcaggcctacttgacctcagcatccttattgacagtattcctctgcttgaggatcctttcttttccatgtcatgtacccatgcatattcatctttcaatatctgcatctaataggttttattaggttattttcacactgctataaagaactacttgagactgggtagtttatgaaaaaaaatgatttaattgactcacacttccacaggctgtacaggaagcatggctgggaggtctcaggaaacttataatcatggcagaaggcaaaggggaagcaagtatttcttaccatggcagagcaggagagagcaagctaatgggaagtgcacactttcagacacactttcaaacaaccagatctcatgagaactccctcattgtaaggaatacagttggtgcagtgggagtcacccttgaattactgtaaccagaaacatcagtatcactcactgtcacaaaaacagcaagggggaagtccacccccatgttccaatcacctcccatcaggtcccatctccaacattgggaattacaatttgtcatgagatttgggtggagacatagagccaaaccatatcatatgtgttatctccataactatttcgatggtaattcagctagaaattctcttcttctgctcttagagcttatgattctttctttcactagtaagccctcaaaacatggagatttggctgatactctccactgctgtgtataagttcactcactgactcatccatggctttattatgtattcattattgtatccattattgtattgaataagtgttaagaacttttggaagtcactttttagaagggaaaaaaggctatggcacaatcagtccttgtaaaaagtgcaatgaatgttatggtagaagagatatgtgtgatcttgcctggtggctccagcagatgaaacaaatgacatagaaatatattaacctgccattaatgggacatgtcacatcattttttgaaagcttataaaataatgcaaacttagtgtatgaggttggcctgttagtattttttatctattagtaggagtgttttcgtttgttagagagagaagtaagaagacatacaccacatcacaatgcaacttgagaaaagggaatgcaaatgaaagccaggcgttatcatttgtgcttttctattttgatctgattccctctgagttttagaagcaccaaggatgtggccgttttcgaagtaaaaaagaggttttgatttggtttattgattccaggaaatgacaggacagcaggtatacctcaatccatgacacaattgaccttagccaaggtctaacatagacatatccctctgtcataccaagacttatcaatgattgtcctaaaaatagttaaaatttgaagatgtgtgttgtgttaatatccatttcagctcatcaatgtctgccacaatactttaatgcttttctgatttttcaactagtgggagtataatcacgaaaagttaccatttattgagatctatgtgtctcacatctttctttgcactctaaatttcagattaattctgaaaactaggcattgttttccccattctgtagctaaataagtcaaaacttagaaatactatataacttgcccaggactacatggtgagaaagccacagacatagactgggaactcagaaatgtcaaatttccaagacataaacttggcagtctcctttatgccacagtgattctcatagaaaaacatatcacttaatacacatgagatgtagaaactaatcccataggagcattggatctctttgtgcctggtggtagagtttaagtacagttaacaagtataatgtgaaattagcatttatggagtttcacaagtttgaaaaagaaccctttgtaagttttcctgaaatttcttactcaacaaaataattgttgttgatgttttttcttaatcaagctcttaatatctgtctgtaaaacaagacattcctaatggcctgttatacagttttatagaatgtggctaggacttagtatgatcttgtatttctttagctccagtatagccatgttctttatcacaagctcaaaccagatttgttaaattttgcctgttgagtaattggattcccagtaacattgggtggagttcatattatgaccataataatgacttgtaataatttgagcagatgttcttcatattaatttatggtgcataggtccaatttatttattttgtttctaagtgaagggttcttactggtttcatatctgccaaaatgtgaattctgcccttaaaataaaaaggaactgaattggttgtcatccccatcgtcgtaaggcatgcagttggcgcagtgggtgtcacctttgaattattgtaaccagaaatatcagaggatgataagaataaaacaagtgaaaataggcaacagattgttaagccaagcagacaaggtaagagttatggaacccacagtaaccaaagaaatctgggaataagatcaattaatcagtgaaagtcatctttagccagagaggcccatgagttggacctaaatcagaaacagggctaaggtccagctggggattttaatgaaatttctactaagaatgtaagtctcatggtaagatcaaagatgatactaggtaggggaaggggtttactattcgtggaagatcataaaaaaagagaaaccatatgccaactttccaggtcccaaacctggatctttcttttcagctcagagagaatgacctagacatacagatagcaaaatgccaagtttttaatttacaaggaatatttgacttacacgcagactatatcagcatggccagaactttctcttcctgcagtaaaatgtaaatgaaaagccaagttgtaacaattgagttgattaagtacaatagcaaataagacatagaagggcttgacctcatttgttgtagtagaatgaaactgacaatagatcagtatatcatcatatagacaagatgatattagattgtgatgggggctataagaaataaattgggataatgtgaaagaaagtttactgggaaagaggatttgctattttattttatttttcctagagcaggcttctctgaagacatgtcattttacccaagacctgaaagatgaggatggtcaagccctatcacaaaacaagtgaagatgtccaggcaaggtaaaaagcaagtcttatcaacagatgctggggtttatactgtaactttcagagctttgagggaaactttctggcacttcataagtggaaaacaactaaatcccttcctctttcacacccaccatcaacatcaccaccatcaccacccccacttcacccccaatatcaacaatatcaataaagtatcaaattttaatttgtaccaaagagaatttactgcctagaggcttccccacacgggtgtagcaggaggtttaaagctacctgttgtgctccacagtttctaaaacacaggatgtaaatattctctagaagagtttggtctaaataagttctatttagattaatgtttaagttattaatatttgttaaagtttaggttagtcttatttaggttaatgtttaagttgacttaaaagtaaactttcaaatataattttaaaataagtatataaagtacgtgtaatatatagtcaaaaatttttgtgtagatagaacaaagaaatgtttaagattgtattagatgttttaaataaaatggtctgcaagatgaggaatatgaagagtgctgaaatgaagaaaaatagctaggagctttcatcatggataacattttgtcatcttcctgctgtgtgacagagtgtttcattttcattagcattttaataggggaaacaatttgtttgttcataggctttcaaagtcttgtatttggagactttttttggagaaatgaatgatgagatattttaaatactattatatatgaataaattatgaacatttaaaaacaaagatgaaaaacttggaatttgaaattgatgtctttatgatcacctaaagaaaaatttatgccagcaataagatacttctttaggatttcagaacagtctttccctttgggatttttttcttcttattttacttctcaagaaaacatgcctctaaaatacctctaactttgcatttaaacaatgatcgaagcttcttatcttgtctgcatgcttttcggtcaaaaattgaacctgatttgtaatctaacacattataaaaacctctgatttattaaatatgtatgaatagcacaaatttctaaaatactgaatatattctaggatgttaattgccaacaattttaaaattatattaaaatgcaaaacagcttttagtagaaacttttggtgctctaaatatttactgaagacatttgccattgaatcattaaaaaaaagcatctcattggtttctaggtgagtagactatatgattgtttagaattacaaaatataagttcttgaaaatgttaaacagaggctagaaatacctgaaaattaaaactttggggaaaaaatattaacatttttgttaaaacacagaagctttaaatattatttaaagaatttttattttatatttaaaaatcgtttcctgtttagtggactacttatcatattttataacattttactcacgtaaattaaattactggtgtgttttagtagaaatgacttagaatttaaagtctgtatgtttggtttattccagctgaattaatttcagctgaattaatttgtctaactgatgcagatcttgacattcttatgtaaaaatgaggatgatgcatcagaggactgcgatgctccctttgagtttgaaggcctaggaatctgaaactgatgatggtaaacaaaacttctggaaagttggttggatatgattggataacattttgtcatctttctgctgtgtgacagtgtttcattttcattagcatctttaataggggaaacaatttgtttataaatataaatgttattaagtgatactttcagaataatgctataagcagtgagaaatttgctaaagcactttcaaattaggaaaagaagcaaaagtaagcttcaacagaaataaaatctactatatctaactaaaacgaaacaaaagcgaacaaaatgatccaaagcagatgacagaaaacttccggaaaacattattgggtataggaacatagaaataaataaagaacaggttatttataaattgtagcaaaatattagaaggcaaaggtactgtaattttaggtcacagagatagtacttaatgaatttcaggccaaattttataaccaataacctctgtgattcagagtcttaagtaggtaaatttaagttacataaatagataataaataattctatattttgagggttattaattgcaaaattttcaattaccctcatgatttcccccaaacatatggttatagcagctaaccatcactgagagtttgaagagatactatgtgccaggaattacataaccatattagtcactgattcaattctgcagaaacgaatgcctgcatatgaggtttttttactgttgtaactgtcatttttttcagatgaagaaacaagtcatgcaggaagtggtggagacagcatttagatttaggtttatttcacagcccttactgttaagcattttgtctataattccttgtttgttatatttgtgttttgtgattatcttgtattaatgaatagaaccagagtttgtcaagtttgaccaagttttgcaaagcaagatttcatgagtgtgtatctggagtggactgctcagaaaaaccatgtttccctttggttttctatttaggctccagaacccactgaaggaacacattttttctaatgagtaggtccaaaggcttgctctctgtgcttgtattctccctatctgaatgtgatggaaaaatatagttaactttttagttgttaactctgggatacagaatattgtctcacccagtgtgttaatattcccagaagttgtggcatcactgaaaaagcacttctgttaaaatgtgttgatcttcttacatgtcactcagtattatacttaattaactctcaaattcacttagaggcacttggccaattcaatccaacttttcagtttatttttcagtatgaagtaatttcaactcataacaataggtattgaaatgaatatttttagccctatataatattaaatgtgttacttttacttgtttcaattttcatgaatcataactatgatgattgtcacttattgtatagcacaaaccaataagcatcatccttctcttttgcaatgtttgattttagtcacagatcaatttcagaatgttaggtgcagaggctcattagagctcatttggttcaaattatcattttcaaagataccagatcatgtaaattactcaggtgataattatttttattgtaattataatagtaacaacatgattataatagtaacaacatgtttatcagaaagctaatatttgtttgattatttgacttacaaagcacttttatatgcattatttcattgagtttcctataaattttgtgagtagcagaagagatgtgattattattaatgtgtaccagtgggaaaagacaagtttactaatgttaagggatttttctcaggctcatataagctataaataaaataaagtagttcaaatcagaatttctgctcctttcaccttatagtaacaccttgtttttattttttgaatgattatcaaatatttcagtattccaaaatgaataaagaacctagagtgaacatcatacattcaggatcctcctcaagaaagaaaatatgactgaaaccattgatggcctcaacatattcttctacaattgatttgttcattatcttttaatggacattttgctctgagtgagaaagagagagaggccgggaggggggaagggcacagaattgtatagggtatgcacatttacaattttatttgattcaccaacttgctctcaaacagggttgaaccaattgttgctctcaagcatgcataagatattctgttactctttgcaatcagccacatttacagtagtgtatagtagtgcatgtgccggtgtagtgtgtgtgtgagcgcatgggagcgagcgagcgagcgagagagacagagagagagagggaggggggagaagtagagagagagagttttaatttggccatttttatggagagagagagagagggagggagggagaggggagaagtagagagagaattttaattgggccaagtttatggaggtatgaaatgattatttttttcttatggtttttagttacatgtctcttattactgctgaagttagcacactttcagataaacatgcagaaacacacccaccatttggatgtcttccctaggaattgcctgtacataaaccttgacctctctgcttggatagctgactttttatcttgttgattcataggagttatttacatactttggataagaattcttgcagattatgttatttttcccagagcttggttttttattttcacatacatactgcctgttttaatgagaagaaattttaaaagtatctactttttatccttatctttcctgttttagctatttatatcttgtttaataaacatttcttttccctgaggcaacagagacattcagacacatttaaaaatttttacattttcagtattcacttttaggtccaacgtaccttgaattcatttgtgtgtgtgtgtgtgtgtgtgtgtgtgtgtatcctgtaggtatggatctaacttaatttatcacaggaataactgtcccagctccatttaatggctactgtgcccttttctactgacctggtgcctctgtcacatgttgagtttccaactgattcagcactctgtatttcagctcttcactgtgtggccttagatttgtcgcctgtggattactatttaaatgttcattgttttacctttaaataaaatttcttttagaacagggtaattccttctcttttttggctcctccttgctccttccactttccttccctcctcctcacacttctctttgtcttatgaaattatcttgccaattttttgaacgtttgcccatccagtcaagtaacaaagacttagatacattcatggagaagtgaccttgttgaaaattgagaaatggctgctttctcaatttctgcaagtctttaaaagtgtctttcaagaattatatatcatttttaccctacaactaataaagaaatgacaattttattattattatggatccagtatatccttaataattatttttagtataaaatctgttttattacatcaatatagtttgaatattttctttcagttactattcacttgaggtcttccttataaataacatttattaatatatagagtctttttttttttttgagacagtcttgccctgtcacccaggctgaagtgcaatggcacaatctcagctcactgcaacctccacctcctgggctcaagtgattctcctgcctcagcctcccaagtaagctgggattacaggcacacaccaccatgcccagctaaatttttttgtatttttagtagagacagggtttcatcatgttggtcaggctggtctcgatctcctgacctcaaatgatcccgcccacttcagcctcccaaagtgctgagattacaggtgtaagccaccgcgcctggcctagagtcattttttaatccaactaaattatatttgtttgtataaccagtgagcttatcttattttatttcaatcaaaaatatatttgtttttgtctctacatattttgttcttcctacttatttgtcttttggcctgacttaattgttcctcttttcctgttttctttgcaagtaaaacatgttttttctccttttcttaattactttgagctggtataagaacataccataaactgggcaacttgtgagaaacagagcttatttcttccagttctggaggctaggaagtccaagattaagatgctagctgactctgtatctggtgtgggcccatttcctggttcatagacggtgccttctcactatgtcctcacatggtggaagcgccaaggatctcccttgggccccatttataagggcactaatcgcatcatgaagcctccactttcatggtctgatcacctcccaaaagtccccacttcctaatattatcatcttggggttcatattttaacatatacatttaggggagacacaaacatttagactacagcacctctgtgttcaactgtttactgacattttaacattctttcttaaggaatctaaagtaaatctaatatttttctaacttctttaagaacaatccccaagcacatattgggggaatacattatttatataatttaattattcctttttgtacaatgaatccttctatctagtaattaatttagatttatttatatgtatatcaatttctttgcccatcatttcttctagtctctcagtcttccttctgtgatcatttaatcatttgaagagtaataatttgctgttttacaaaatccttatttatttggctttgatatttcttgataatttaataagattatgaatttatgtcaagaacaccacaaaagtgattcatgcccttcacaaggcagcatttcaggtggcacatactatttgggtgtctcattacttgcaatgttaaatttatcacttggttaagtaaaaaagaagtgtcatgaggataaagaacgatggtgtacttgtcctagaataaaggagacgaaggaaatcccataactgaatgaaatgtgtgatcctggattgaatcctggaccagaaaaaggaacactattattaggacaataaatgaaatttgcataaggtctgtagattacttcattatattgttgtcagtgtttaatttttggtgttgatgctcatattgaagttgtttaaatagaaagttagaaataaagattgttaaaattgccctcatttgacctcctttctttgattatcgaagtgaaatatatacagatttgtacattttttaatttttattttattattattattattattattattattattattattattatattatttcagacagagtcttgctctgtcgcccaggctcgagtgcagtggcgcgatctcagctcactgcaagctccacctcccaggttcacgccattctcccgcctcagcctcctgagtagcttggactacaggcgccctccaccgcactcggctaattttgtttttgtatttttagtagagacggggtttcatcatgttagccaggatggtcccgatctgctgaccttgtgatccacccgcctcggccccccaaagtgctgggattacaggggcgagccgccgcacccggcctgtacatataaattttttaaaaagtgaacatatgtgttactagaaacatttggagcattttttgactttcattattgaattactgttgatttgggaacttaattccaggttggtatctactttctctcaaaactttgaaatatctttcaattattttctgtttgcactgtggccattgagaccttcataggccaacctaatagacaatttgtaaaagagctattaataccgttttctttaaaaagtcttctgtttttatttggttttggtagatttagtaatgtatactataaataacatttttatcctaatggaaatgttttatgcttattgatctaaatatcctggaacattttttcatctgttttggaaaacagtagtatttctagctattaatttatcttctctactctctctgtcttatcttggtagaaatccaattagatctttttgactttttattatactcaccatttctctttaactctccttcatatttttcatttattggtgtctctgtttctttcaggcaggctttaggcctcaatctgtcttccagtttatttgatatcttcagatgtgatcatctatttgttttttaaatctatccatttaacttttaaaatataaataattacatgtttcatttctgcaattttttggtctatcttttattgtttcatgttctgtgcttgtattttcaatgcacttttgttctttcaaaattatacattcttttttcatattccaagtctgaccgtttcaacctcttaagttaatactggtctaattgtgccgtttatggtttttgtaaattcgtacttctagacacatagctcttgttagttggggaacatagattgctagtttatgttttgctggactttgccactggacatcatgtgaaaccgagtctgagggttcatctttctaatagagattccattagtttttgacaggcaaaccagggttttaacaatttaggacccacttaagttaatagttggctaaaagtatcccaaacaatttagttactttaaaatgaaattccagccttctcagaggacaggttctgtttacaaattattgtggcagacatatttatattccttggaatcgaaaaaatttttatctctgacatttttcatatgggaatttttttctaatttatgacattactaatgattggctctccaagagtttcagctttatgcaagagcaccaattcctatcttgcctaatctataccccacacatcctaatctcttcaccacatagccattgtatctcaaacattatcttatttaatcttgacgatttttagttctcctttttatggatgaaaaacatgctcagagataaaatagaaggtcatttggtcaagtttacaaaggtaaaaattcacaaagctgagatgcaaatttttctgaaatacttatcgtaattagatattacatacacacacatagttatatatgtatatatacacacatacttatgtatatatacactcattatatataatgatataaataatatatagcaagaattgtcaaacataaagtttaacaatttaaaacattaaattttagtgtgaatacactcagatgtctcccgtcttcctcctattattattttactatatctgtgttattatatgttctttcatctatgtgttcctctatccatcaataagtctattttatctttgatgcatttcatggtaattggtacatgttagtacatttccctacataggcttcagcatgcctcttttgtttgctgatgtaaaagatttgtgtaaacacaaatcatgagtatacgtgccgagttttgataaatgcataaaatatggaatactttgtgaatttgtatgttatccctgggcacaagatgatgtgcaagataattttctctgtatcaattcaattatagtacataccctgccaaagaaagtattcacatacatttaaaaattctacttatcgtatcttttttaaaaaggatttgaagttggttatagaatacatgagatacataaaatacagtataatgtccttgtgataagattgaataactttagaaaggtttagagtgatgatattaagtggaaccagggagaagactatcatgcttatcacacaatttttgcacataaataattctacatgttactactatgaacaggttatcagagtaatgaaaaccctgataatgagctggtgctaaaggagccagccccccatcaaaacacaaacaaaacaaaacaaaacaaaaacaaaaacacttcattcccggcctctgtttaaaaactatttgtgaataaaatatatataagtatgctcattgtagcaaccacatattcgttcttcaaagtaaaaagtgaaatttcaaattggaggaacttatgtatattttagaaagagtagtggaatttccacaaaaaagaatttgtgcaacagttttattttacaatatccttggagaatctttggctacggttaggcttcctccatgttttggtaaccccagggctgacgtttgagggtcataatgcatttttatttttgttccagttctcatagttgtattttccttctccatcacaaaaatgattggatctcaatcttgaatactgtaaaaacttagccttggttttggctatcagagatgacttacaaattgtagtctgtctttaggctgcattcttcagagcaaatattctcacaaatcattaattttaaatagaggactaagatatttattaaatatcacattttcatttttttcaatataaatcattgaagacccttaggatcatagttatacccagggagtttatcaataacctgtagaggattgaattacatacattaataattaaatacaggtaagcctttacttttctactgcaatcactagttaccacaaatgtagtggcttaaaatgacaaaaaaaaaaaaaaaaagtattctccgggagtggtggctcatgcctgtaatcccagcactttgggaggccgaggagggcggatcatgaggtcaggagatcgagaccacaatgaaaccccatctctactaaaaaatacaaaaaattagccaggcgtggtggcgggcgcctgtagtcccagctactagggaggctgaggcaggagaatgtcaggaacccaggaggcggagcttacagtgagccaagatcacgccactgcactccagcctgggtgacagaacgagactctgtctcaaaaaaaaaaaaaaaaaaaaaaaaaattgacttacagatcagaaacctagataggctttatagggtccttcacttagattccctgaagagtaaaatcaggttgtcagcatggttgcctttcttactgtaggctctggggaagaagttgcttccgtgatcattcaagttgacagccaagttcagttccctgtgattgtaggactgagatccctgcttccttgctggctgttaggtggcgaccagcctttacttctagaggttgacaacattttttctcatgttaggtaaggtgacaccttctgcaatacagcctgatcattttctcactttgaatctctctgactttcccttcatcttagtgttattataaagaaatactttagatattcctaaaccaaactttgaaagctgcttctttatattagtggtttctgactgtacgtttatactgtaattttatctcttatttccatatcatatctatgcaattcatccatattaaggcacgttgctacttttttcaccatggtatagttttccattgcacatacatcacaaaacagggatttattctgctcatagaaattttttgtggttattttgttttactttaggcatttacatatttttctacaacaatgctggtaatgtgttcatatatctctccatattcctatgtaagagtttcttcagggcacaagacagaaagggaatttctgaatcaaatggtgtgaacttactccatttttgatgacaatatcaaattattttccacagtggtggtgccaatttgcattctcataagcagtgtgagttcctattgactcacattcttgccaacttgtattgctgaacttttatatttctacaattattagtgattgagtcctctgagttctatcttcaaaaatatttataatgtagccaaacaattctgatctcttatgtggaagataaaatagtagagcctgtcaactagtctcagtatgttcactctcaacacaatctgtctagtcaattccctgttaagtcttttcccttcagtagatacaacaatcaaaggagcttgaatatcaggtcttgttagaatccttcctaaaattctgcaatgactgttcaaggtactttggctaaatctaggggcatttttttttctatagcccaaattataaacttctgccttccttttaaaatatttctcctgttctcaaaatccttctttcagtttctgggaatggccagctctctcctatcacagggcctttgcacagacccctgttcctagaacacttttcaccttacctgccttttgctcagatataaaatatcagcttacattcaattattttttaccatttgctttagatatcaacttacacttcacctcttgtgaaacattttctctcactccatgatttacactaggttccatctcaaaacacatccttattatttgtttcttcataggtttataacattttggaattatttattgccggttcacttttatattcctttctctactaaactgtaagctccatgaaaaaactttgcccaccactgtggtctcctttgcattcccaatcgttaatacagtgtaggtgtttgatcttcatatattttttgaatagacaaattaatacgatatatgcagtttttcatagctatatcattgctaacagatttactggtttcatttatatataaatatgctacatttaaatatctaaagaaacatttgtctttatataaagtaagtaaaattacttcaaaataaataggtatgatggagattgctatataactgctagaatatattgaaagtaaatgttaggtgaacttttcatagatgtacccaccttgatttaattactgaaatactaaaaatgaacatcattttaaggcagcctacctagcatggatttctatggttagtaaaacaatcagactctagtacgcttgtagttggataaaatcttcatgtgaaagaggattttaaaatcacatgtcctcacagaataccactacttccactactaaaattattttggagaccttaattgtcctaagggctctatatacatattttatttaatccctccaccaatctcatgagttaaacactgtcattatccttctttacacacaagtaaggcaagccttaggagacataataatctacttaaaagtatatggccagaaatgatagagttgggacttaaacttggagttttcttttttttttccttttgagatggagtttcactctgtcgcccaggctggagtgcagtggtacaatcttggctcactgcaacctccaccccctagggtcaagcgattctcctgcctcagcctcctgagtagctgggattacaggtgagtgccaccatgccccaattttttgtggtttttgtagagatgaggtttcaccatattggccaggctggtcttgaactcctgacctcaggtgatccatccgccttggcctcccaaagtgctgggattacaggcatgaaccatcacacctggccaaacttggagttattacttcaaagtctatgcttttaaacacggtccttatctaaggccttctttcattagcagttgagctatgaaaaacatgttattatttaggattcactaagcaatcagtgccttcacattgttttctatatattagcttgattatggtatttttttatagtagggaatcagagacagaaagaggactaaaaattgcagacatattcaatgtgcaagatatggcttggaagggagagggggatacataaaagcaacacgaatcagatctttaaactcggaaagcttgtaattattttggaaaggaacacatttttctgaataaataaatgcatctgggaaaaataataattgctattcattgtgatatcccgaatcatgaagagtaataggtaatgtgcaatattgttttaaaaagattttcatactaccctttaaaattaaatctgtcagtattagagataagcttgattatgtagaaattagctataactaagatgatctgtagggactaatggaaaaaaagcaataagaggttattacaggtagacgagaaatagtcttattttttatgtttacaaaactgccttgtcttctagagggtaaagtagacataaatttgattctcatttaaatacttgcactgtcaaatatatcagaccatcacaagagaaacacacactgtcctccaaataaacaattctaatccactatacaatacctaattccattttcctactattgcccaatctgaaatcttcttctcttttctggcctgtactaataattcagtctaggcagggtcacatgtttgcaactgttagaatctgtgtctccctcctgctgattgttggtctttctctaataaactgtttatcttggccatattggctctgagagtgtagggttcacatggaatttctttttgctttagatcttttgctttctgacaaatttctgtctgttcttctattgtcctacctgtgaaaaaggtgttttctgccaacttgtagccagtagagcaaatatatacaaataatggagcattctatcaaactgccaggctagacaatgtccatcttggatgcagtcctactcaagatgcaaaccatacacatgtgcctcaccaagtgagccagctgggtgtctccctccagcaggccagaagcagggccaagtgtgtaccaaccagcagttgcttttagtaatgtggggtggaatttgaactgaatttctacagtccttcaatatatgcactggaataattaaaaagatgtaaataacagctatcagaatggtgccagactcttcactccactgtcctgcaactgtcctcccctgttcatcaccagaatagtttcctgtgggtctctgttttcccaagcaggactttcagatttggaagaaagaatgcattcagactgacttgcttagatacatttgctccagagttcacagggactaatggatgtgtataccagctgaagaagatcacaattagagtgcagtttttttaagctgaaaagactagatttatttataaaatgaagtgaaagtcattattaggaaagtcatcattggaaagtcattgtcaggacattctattttaaagtctaaaaacaaagaagaagggaggaagaaaaaaggaaggatgaaaggaaggaagaaagaaagatgaaaagagaaagcaagcaagaaaataacaaagaaacaaacaaagaaagatgtttcttggcatttttctggttctccattaaataatagtttagatagttgccagactataactgtcttctaataagaaattatgtgtctggacttaaccacatttgctgtctatgccaggtcaagtaaattaaaaaattgttgagattgtaaaaagggagtcaaaacaatcagaaactcatgtggtagagacatcacaccatttggagagacagatatgactaaatttgcttagtacttaatctaatcttggagaaattaccaaatctttctgaccttcattttgttatccttaaaataaaggtgaaaatgaacctagttcataaggctcataaaaaatcaataagatagtgttttagtttgttctcatgctgctaataaagacataccagagactgggtaatttataaaggaaagaggtttaatggactcacagttccacatgactgggaaggcctcacaatcatggtggaaggcaaaggaagagcaaaggcacatcttacatggcggcaggcaagagggcatgtgcaggggaactcccatttataaaaccatcagatctcatgagacttattcactatcacaagaacagcatgggaaaaacccgcccccatgattcaattacctcccaccaggtccctcctaagacatatggggattatcaaggtagatttgagtagggacacagagccaaaccatatcagatagcatgcatatgtacatagaaaatgtcaaattgttcacgatcagaaaatgtttgttctctcccctattcttttccctttcctctgtagctgtgtgcacatatgtattttgattatgaatgaactccatttattctttcaccttccagctgagctcttatcccttccctgattttctctttcacttaaaaatggactaaggaattccactctgtttatattttatagcatatatttaaacatttctttcacattattgttggctaagttttatagttcttcaatgctgattgctacagtgtctttcaaatccaggaaaaatatgcaactttgatagtcccaatgtgcctgcagatttgtaggtggaaggaccgattgctttatgattaagagtctgcaataatttgtttaaaaactttaacttgcaggctgttaatgattggactaagtgactgaggaaagatcaactttaattgtatgacttaactctactaagagtttcataaacacattttaacagttttgttagaatagttatcataacataaatgtatatatttttttaaaatgtgtaatattgggagtggaatttatatgaaaaccaactaaaacatatttaccctgtgatgtagccccttagcactttcataaaaagtagtatgaatgttcactttatttcaaaaggatattattagatcacatataaaagttaaatatacctaaaagatagcaataatctaattatgtaatcagttttagtttgggaattatttttgagtaatgatgtaattctaagactgaagaaagttaagggatcatatatatatatatattttaagagggaaaaaggccagttgtataaaacatcagaatcaacaggctgaaaataatttcagagaatgcattgcagtttactgttttctggttgatgtaacgaatgggaatatgctttatagggccatgtctgactaagactactctgtcttcataattaattttatattttcactacctcttataaagtaaagaaattaaatttctgtaagtttaatacataataataattattcaactttatatgctttaacatctttggaaatttcattgtatttcaacatatttgtgaggtgacaggggagtctcaattttattctcattttattttccatttctttgtaattaaaaatctcatgtgacataactacacctcactataggacatatccaatcctgacaatttttatttgtttgaatcaatctttacaagaaataataacaatctgacagaattctgtaaaagacggccaatcagcaatcaactttataaggtactacaatatcctgtaaatacaagttaaaccaattttgaaataagactgtcagtgcttctattcttgtttgatttgtttggcctgggtgcaaacatcttctatataaggtattttatatatcttaattgatgtggcagtaaaaaatattttaggaatttccttgtctgccaataagattctgtgatgtattatttacaaacatatgttcttgctgtgagagttactattaaaaagaaatatgtgaatttttcgtgaactccaattataggagaaattgctttatatgcctgtctggaatatagtttaccttctctctgtaccaaaattataataggcttaacaatgcctatgaagaatcggggctaagatgttatcagtacttagatttcttaagtgaatgacctttgagctatatggcatttcaatgttttatcaacatagacaaacacagaaagaatccaaaaaaaacctactgtaagagaagctgaaatactcaataaacctttgcatatttccttcgaaatgaaaacaaaacaaaaatagcatacttcttctactttaaatagtctattgctatcttcagatattttagttttacttatgctgcctctcagtatactaagagcagtggaaagtagcatagctaatcatgatgatttttttcagtatgcatttctcatgtggtcatttattaatttaaatcaaattggaaaagacaggttattttttgaacttacaaactaaaatcttgagtagtgggatatgattcctgcttatgtgattccactgactttttatttcctcctttattctacccatgcttcctcctgccttttctccctttcttatttctttgtactctgcttctttatttttcttcatctccctttctctttcattcatccagtcttttaaaatatataaaatgtcagcaaatatggtattattaaacatattcttccacagaatcagaggccatttttggcttacagtcgaaatgatcaaatatacacctctgacaacagccaaaaatattcatgtgttacttaaatttatctgaaatttatttctacagaatgattttagaaaaatatccccttctttaaagaatctaaaacagagcctgttctatttgatccataatgccctatgtgtcctattcaaacccttgtattttgactttctcttctagtctcagtggttaattaccattccatcccaagaggaaaataattttcttatgatccagttttaataacatattttactccatggaatgccaacatttatgcttgagatatttttgtaacaaaagaaaatagctaaaggtgttgtcatcacttgaacctaatggaatttgcgttttttttttttttgacatgactctaagaattcagtcagtgtgacaaatcccatatcctccattgtctatgctatgtttcaaaaaaaggtaaggtgttctcaaatctggtaaactaatttattactttgaaaaaacaaaacaaacctcttaacaactagaaagtatgtgtaagcgtgtatgtatgtatgtgtgttttatcagaatgaaattattttcctgttaccaatgatccatacaagttttagtttaaactaacttttcctgattatttttgaatgaatcactgaaatacttatgtaggtaaattgaaattccttaatctttgatcttcttaagcttaattgcaatcttcatggcaaatttgcgtattcttggtaaatgcatttatttcatttatgatttaaatttgtgcttattaaaataacagctaaccatggtttttggtttgcagaaaggtctttttgtaattctatttacttctccaaatttatgatgaacacattattattattattgtcattttaaatttaaagaatctaaatttcaggtaagttgattttccattgccatgtaaaatattcattagagaaaaaagcctggaacccgtatgtcacaattcctcatttagtatttctttgatatttatcttataaagatacagcaaggatctctactttgctttgtcttttcttgtgtttcttcaatctattctccatcctgatcctttcacagtgcaaatcagattatgtaactctgctgtttaaagcctgtctttgggttcccattgctctcaaaatgaagaccaaagtcatgaacgaggttcataagttcctgcagtattttttttatcttttttcaacaccaacatactttcatttgccctggcgtcctttgcactctggtcacgtggcttttattcaatatttggacttccaccaaagggatttccaccattttgatcatacattctgaaatgctatctccactcactctcagattcccaacactgtctttctaactttttcattttgatctccagtgaataccacttccctccatccctgaagtttcttttatacccctggaatctttttatacagagtatgtggcttcctgcacttatgtaaaccactacttggaatggcataatctaattgcctactcatatctgatcattttgagttaaggtccacttccttgtttctttttcctgctactagtctttatcttgatgaaatatgattggatgcaggctacagagaattcttcagacaagtgcccttgcagagtgcagtgaagcactctggctttgtgggagaaaaagctataccatttctttattttgctctttcctttcattaagtctacatattctccctagtaacatgcaggtcaaatacttttttttttagtacaagaaaacttgataaatattgtatctttaataaatactgtaatgttgacatctaatgaaaaatttgctgctctataaaaactactttgattgactatttcaagtggctactgatgtatgagatgaattgatacatgattttgtgcttcacaatacaattctgttttttaatgaatctcagcagttttctatattcaccagacattgtgttagagtttccaagcgagtttccaaatcctgttgactttaacaataaatcttgctaataactattttctggaaagaatattttctttaccataaaaaagtatgtatctgcttttctcagcttggcagactctgtatacattgttctccactgcgtggtgactacagtgactacaacctcaaatgtagccaagggcaaatgatcactggccaacttgatcagccaaaagataactttatttactaaattgcatatttcaagggagtaaaaagggataaactttttgaacagattttcaattattaatttgttggatgcatgaatatttagtaagggttataagtaatgaggatataagttgccaggcacagtataagtgatatattaaaaattgttgaatgaaatacacaggacgatatggaagaatctcaccaacataacactgagttgaaagaagctagatgcaaaggaaggatattatatgattcacataaagtacaaaaacaggcaaaactaatttattctgagagaatgcaggatagcaattaaccactggagagaagcaatgcttaatgggaaacataagagggtggatgtggcctttgtgggcctagtcatgctctgcttctggtgtacatgctgattacaaagtaatgctcagtttatgaaaattcaagcagctgaaaatttacaaagtagatgcatattataattgaataaatgaagatatagtattttctataaccttaatataaataaagaaatatatgttaggtttattgtaaaaggaatcaaatatgtcttttcctcacagttgcaaaatgcattgaaattttacatattgataatcttcttcatatagacatatatcatcaattgactatattgttgtttcacacattgtttagtagtttaaagttttggttttgttttggtttttcagagacagggtctcaccctgttaccaaggctaatgtgtatggcctagtcttagcttactgcagccttgaactccttggacttaagtgatcctcctgcctccacccgttgagtagctgagatacaggtgtgtcactatgttcagctaattagaaaaacaacaacaccaaaaaactgtagagacaggttctgactatgttgttcaggttggtctcaaacccctagcttcaagcaattctcctgtctcagcctcccgaagtgctgggattataggtgtgggtcaccatgcctagccttgacaaattgttgttgatttagtggtgtattagtctgtgctcatgctgctaatgaagacatacctaagggagtgggtaatttataaagaaaagaggttcaatggactcacagttccacatggctggggaggcctcacaatcacggtggaagtcgaaggaagagcaaacgcaagtcttacacagcggcaggcaagaggcaagaacttccctttataaaagcattgtatcttgtgaaacttattcactataatgagaacagcacaggaaaaaacccacctccatgattcaattacttccaactggatttctcccacagcatgtggggattatgacaattcaaggtgagatttgagtggggacacagccaaaccatatcaagtggtaccatagtttttgcaggagaagagcaagcaaattcaaatacagttctatttttcattcttctccaaataagaacatgtttactaatagttctggccttttggttccttgatgtcaataaattgaagataggataatccgacatcagttccttgagatattgtgtgctcatttttgggacaagaattatatagatataagacacttactttcttttaatagcacaccatctcccagcataccattcttctctttttattcatctcttaacaagaatgtaactactcatatagcatgaaaatgacatagaggacaaaaattattaaagctccacttgtttagctcaagtaaagggtgttaatcacaataatgcacagagaaataaggatacagccaactccattaaaataactatacaatcagatatatctaggagactgagatataatttcagagcagaaaaatagttgataatcagagggaggttataatggatattgtggtgacttcccagagccacatttagaatggaggcacccactgttatagccactggcattggtgctcttggaattgccctcagctgaaaagaactgctttgcctaaagtcaggcctcctctctggtgtgaagaccttgtctaatgacagattaaaataatgtgtgaaggtctgtctcctttggcttagtgagtgtcaactctgcagggctggctcatctccagatctcctcttgaggttgttgtgaatgtatcactgttcatcattgcctcctgcccaatcctatttttttcaccctccacagtcattgttcttgcaaccaccccccaataaaatccctgtgtacaaacatctgtctcagggtgtgtattattctgttctcacaccactaataaagacatacctgagactcttccttttatagaggaaagaggtataattgactcaaagttcagcatggctggggaggcctcaggaaacttacaatcatggaggaaggcaaaggggaagcaaggtggtaccttcttcataaggcggcagaaaggagaagtgcaagcgggggaaatgccctctcttataaaactatcagatcttgtgagactcacttattataatgaaaacagcatgtgggaaacggccgtcatgattcaattaccttcacctggtcccgaccttgacacatggggataatggagattataatttaaggtgagatctgggggagaacacagatccaaaccatatcagaaggcatttcttagagaaaaaaaaaaaagacaattaatatcaagagtggtctgagaaaaacatttttaagataggattttggaactgagttgcattcctgccagttctccccaaaaacctcatcacaggtagcatgtaggacatgagcaaatccttcaagctataatgtttcatagtcatggcatgggtaaaatgtgccatgactatgaaaatggataggatattggtggaagagaatgcactggcaggtctaataggctaggcttttgagaaatgcaggtaaagagttaaatataaggactatagtattttatagctattgctggagaaaatgtatgcaaaagaggaagacaatggaaagatgaagataatccacaattaaagactaaatgtgaaagctacaggcttcatgagcaagatacaaagtagagattagattggctggttggttacccatctggaatgagaaatattggaagataagggacaaggaaatctaagtatgtctcatatagaaataggcttctgggagagagaaaaaattattaaatcctttttgcatgtcaatgcctatcgggagcaccttttctgaagtcccacaccttctcttgctctcacttcctttctgtttgaagaacttcctttagccatcatttaacagttggcttgctagcgaaatattttaattttattacatttgaaaatgtctgtatttcctcgttactcctggaagatatttttgctgaatatagagtttatggttgacagtttatttctttcagtacttgaaaaatgctgcatcacttccttctagcttccattgtggaaaagaaagtcaccgttattcaaattggtgttcccctgtaacactcatttgtctctggttggtttcaaaatatttgtctttgtcattagttgacaaaaatttatttatttaggtgtcttggcatggatttctttgggtttatcatacttagggtttcatctatgatatggtttggctgtatttccacccaaatctcacattgaattgtaatagtcctcatgtgtcaagggtggggccaggggccaggtggagataaatgaattatgggggcagtttcccccatactattctcatggtagtgaataagtctcatgagatctgatggttttataaatgggagttcccctgcccaagctcttgcctgatgctgtgtaagacatgactttgctcctcattctccttctgctatgattatgaggcctccccagccatgtggaactgtgagtcaattacacgtcttttctttataaattacccagtctcgggtatgtctttagtagcagtgtgagaacagactaataaacaatcagcttctgcgatctcaaatttctgtctttaaccaattcaagagttttcagccattattttcaaataatatttgtgttaccctctttattcttctgaaactttgcagctagaaatctcagctcttctgttgctgttcctcaggtttctgacattctgttcattttttctgtagagtttatttttattattttaattttaatgtaattattttgagacagggtcttactttgtcaccctccaacctcaacctcctgagtagctgggactataggcacatgccaccattcctggcttttttttttttttgtagagatggggttttccatgttgctcaggctggtctcaaactcaggagctcaagtgatctacccaccttggtgtcccgaagtgctgagattataggcatgagctaccgtatgcagcatttacaatccatttttaatccattgttcagactgagaaaatttgattgacatattctagagactccactttaatgacaaagcaatccagtgagttctttttcttctggttgtatttttcagttccataatttccagttggttcttttatataacttctatttctttgctgaaattttctttattttttattttaagataacttataattgttttttaaaggatttttatgaaggctgcattaaagtccgtttccgatcatctcaacagttgattcttttcggttttggtctctatcatttttttcccattcaagttgtaatattttatttttcatttgaatattacattatgagactccagatcctatttaatcttaaagtatagtgcaagagtggagtgagtttctatgttctgctttattctcatccccactggtaccacccaagcgaaggcagacagctgactcacactgcttcattggagacaggtgcagtataagctcagctcctttctaagccccactgacatgagaaaatggagaagcagaggtctgaataataccgctttgtgcttctgggtaggagtcgtaggtcagctcctttctaggcctcactggcaccaggggaggagaaggaaggaagtggagtacaaactagccttgcctctgtccgccttgttctgtctcattgatattgggtagatgaggagacttattgttcccctggaccctactgataccagagatgtgggcagagtgctgccatctggagatggagattcaggatctcattgggttctgacaacacagaaggctgagtgggtgtgtgggaagaatgatgcctagctgtgaatatcctgcctctgcattgccttgttgttggattccaccaacgctaccttggtgggagaattgcagcattacctcttgtacaaacaagagattgagatcagtaccatttggtccctgttatactaacccagtaggtgaattagattgttgtcatctacttccactagaagaggtttgcataataaactcctttctctgcactgttaacaatatccagctgtgaaatagaagctccatctgcttctgcatgactgggaatggaagattagttgtttgctcagtgctgctgacaccatagtttttccattgggaaaattggagctctactccctgcctctgcaagatagcttggtgagacagaagatcagctcctcactcagcctcaccgaaactgtagggtggggagagggtatgttgatgttttttattggtgtttggctggagtaaggcagcaattgctggaatggtgttctgttgtttggccacctggccactttttcctagtactttggctaataggaattggtttttcttccaggtttttttttttttttttttggtgttctattggcagttataagtgggcaatttaaaaaaaaaaaaaacctgggaactcaccaccatgttcctcaagtctcaaggtcactactcagcctactttctttgttaacatttcagactttttaaatgcttgtttgttgtgttatatccaatggtttttagttataagaggaagaaccttggttgtattagggcgatcccatcttgactgtaaactggagtacaactggtgataaaggagtgtgaaagactgccctctgaagggtttgctcagtgccagagatcttttgagattgctaagaatatatcaaatttaaagtcctccctctgtctaatcccaaatgtgtgactcttctgaacgaggtgttctgaagagcactccctagaaaactgcctgaaagcaaatctaaacctcagggtctgttttccatagagcctgaggtaagacatagacctatgagcttgttacatctcaggaggaagaggtggtcatgtgatctttcccagtctgcaaatataatgtccatgttctttcaatctcagtgtctgacatttccaaaggaactgtcattatattctgcatatctttgtgtacttcctaatatttagtcattgtttctgcttatgtatcatttctattcctttttaatttgtattggcttatttcatgaactggtgggaatttgggtatctgacactcaaaaacgtttgtgaaaaatttgattgatacaagttaatcattctcatttaacaaaagaactagcttttgtgtcaatgtactccatagaattctggtcaccctagagtttgttaggtttggattagatgctcagctcactcctagcccaatcaactatgacaagcggggtttagaaatatgttataactatttccatttccctcagtagaattctgggtttgaaaacttccagaagggctctgggtgtggcacattttctctcgttttacttttttatttttgaattctatactggtcattctttatttacatttgtttttcttttattcctgcttctctgtatctttggccagaagcctgtctgtgtcttatatactttaaccaaaatctggcacttggcttgttttacttttctgggtggcatcgttactttacccacactgtttccacattttggtgtatccacccagtggttgaaaggactacagggcactttctagtaaattattctaagatacagcaactgaagcaccaccgtatttcaaaacataatcagagacctataagtcaccatgaaatgaaagattcgtttacaattatgactgtaacagaaatgttaaatcctgtagcttctaatgcttactaagtttcgttgaggttgggtttcacacatggttcccatcttcacagggaatatacataaaacaaaagaacaaaatacaatgagtggaggaaatagccaatgtttttggttattgggcacataatccccctcaaattaatcacattctttgtcagaaagagatttatatttcctacccaaggaaaggacaagagaccttttccaaacttgtagatgtttgacagtctcctttcaccatgatatactctcttatttcgtcttctccccacctcttattcttattttttatttttatttttttttgagtcagagtctcgctctgtcacccaggctggagtgcagtggcactatctcagctcactgcagcctcagccccctgagtttaagtgattctcatgcctcagcctctgagtagctgggactacaggtgtgcaccaccacacccacctaatttttgtatttttagtagagaaggagttttgccacattagccaggctggtcttgaactctttacctcaagtgatccactcgccttggcctcccacagtgctaggattatagggatgagccaccatgcctgcacccccatattctttgatgtgtctcctctgtctcttactcacagacctttataattcagtgcgtatgtctgtgtgtgtgtgtttattggattgggtttgattatttccttgatttatatatgcagaatttcacaattccaactttagtggaataattaaatcagtttttttgtaccagtaagtatttctatgaccctatctccttggtatttgacacagcaacctcaaagagcttgcaaattcaataaatatttaatttacatggaagtgagtaaggcccttgacatatgttgcattaaaaactatatagtctaaaggtcccttccaattttgggcacctttaagaatgctctttaagttccataatacctacccaccacctttgttgttgttgtttaaaaatatagctacctataacttcataaaataacaatgtatttagagagaggaatatctcaaaatcaagctctggtaaacgttgaatttaacagtccataacagtgatgcaagatactacctcacagtccattttttaaaacaccaacctttgtcttagaaacaatttggcttcaagcactggctttcataaatcaagcagtgtagagaacaagaagctgaacacgccaagagagttttagcagctcaatacattcttcatccagaagttgtaggaaactatcatatttttagtagatttttaaatgaggaaagcaagatttttcaaatgaatcatacctaagtactttcccatgtaactttttaaactagggattgaaatacagccttataaaagtgatctacatgtaagcttgtatcgctggtttggggtatgatggagtcaagataaaaagataaggtttaagaataacataccttataaattgcattttgaaaattttctttttgttttgaataaaattattaatatattgtcaacagcaaaatcagatcagattgaaaactttaagtttatggtacatacaaattgacagttgatgaactgtgaatgctcaacctaaaagtggtcaaaggaagttcagacatatggtattataggctggggtataaaacaaaaatgaagaagtcacttaatctctacaataattggctattgctactgaggtttcaagatggcagggagttagtggaaggtgatcatattataccatttttagaagccaacgtgtttcatttatgactgtcagaggcatttacaagaaatcacctaagctacgtttcactcaggtggcctaactgattttgtctgatcaggggattctcaagcttggtctccattttattttaacactacccacattttggtcagcctctcagaaagctgagcatgtggccaaatggtatagcattactcggaggtaccacagttgatgtagtcactggagggatagtcaggaagtcactgtcactgaggcatgcatgaccatcacagacatgggtggtaagggcattgagttctctgaactacataatcctgatagatgccatttgatgtgtgagtggcttccaaagggcatttaacacacttgagaagatagaactctccagagagattaatacaatgattatgaagagagtactagtcaaggactgaaaaattccctagagcagagattcccaggagccaagatttaactagttaaatacattcatgaaagaagcctcgcctggccgggtgcagtggctgatgcctgtaatcacagcacttcgggaggccgaggcagaaggatcacaaggtcaggagatcgagaccatcctggctaactcggtgaaaccctgtctctactaaaaatacaaaaaattagccgggcgtggtggcgggcgcctgtagtcccagctactcgggaggctgaggcaggagaatggcgtgagccgagatctcaccactgcactccagcctgggcaacagagcgagactctgtctcaaaaaaaaaaaaaaaaaaaaaagaaagaaagaaagaaaaaggaaaaaagaaaaaaaaaaggaaaaaaaaagagagagaaagaaagaagccttgccttttggggaaaagatttgcatctgatcttaagttattttaagttttgggtaacaatgcctaacatattaacatagaaacagcgttttctcccagtaagagcataatctcctttttgagcaattagggtattaagaactctcctatactgaagctaaattgttcacttcagattgtattacttgaagataacttaaggcactattagaaacataaaaaaaaaaaggttaatagttggaacaaattataagattagtttttttagtctggatggcagttagttgcagtttctagatttaaacttaaagattcaaatctaaaaatgatggagtgagaatagcagttgcaatgtgatggattttcccggtttgcagtttgagtgtttctggttatgacacggggtgttatagtggcctctctgagaagcccacacagtagcaggcatgaaagttgcccatatatgatttgttatggtaatttttttgaggtttataccaagtggtccaatttcagtttgcagaaattggaaacagatccgttttaatttttagtgaaaaaagaagaatttgggatctactccagtttatgggtaaacaataaaacctcaaagacaatcaacaggttagaattatgtgaggtgaagagggttgtgtactaggaagtgggccctcaccagatatcaaatcttccaggactttatcttggacttccggcctctagaactgtgagaaaaaaatttccagtgcttgtaagccatttagtctatgatattttggtacagcaacctgaatggactaagacaacttctaaatgaaaaaaagcatatatctataaagcacaatgagtagatatggacactactaggagtaaagaaacatttattgagtggagtggtagaaaataatagtgctcagccatgtctgattgttttttcttctatggaaatatagaaaatcacacctcctaacaggcccataggattagttatggccaaggaaaaatgaaaggaagtgatgtgtctcacttctgggctgcaggaacagtaatcccatatacagttctcctatctaccacttcctccaagacacagaatgtggaggccactgttgaggatacaatgtgaaaaggatgaagctgcctggtatactgagtcactgcctggtggatcaagtcaaccaaacgcatggtggactttacagacatgagaaatacattgtgctgtgttctgctgctgagattttgggattgtagcatatcctcatctatcctcactaatatgggaaatggttaaatgataacacacatctatctaccatctataaacatgaataacatttctgaggtatcaatttgcaaacagcataaaacagaaagaaaaacctcacactctgaaatttgtcattgaatttaatagcaagttaagtaagctgtatcgccataatgctacttacgtagacactgttggaaatggtttgattttgttgactgcctgcccgtgtggtaaatccctataagttaaaggcacacacaaaggtcatatttgcctcagtaacgaattttttagtagcaagcagtagccactgtcaggctaccataaaggatggttccacgaaatggctggaaatgatgctcatgctctcataacgagtggcagggaaataaatctctccctcattctgatagactttgccgtgtttggcaaagctttctaaagctgtgatagagagtggagttagcttcaggaataagccagtcccgtaagaatgttagaggaggcctttccgtgtccagcaataaattgtctatctgataggtcaattgactcctgttggagcccagatcatcctgattgctgcaccaagcaccatcatcagtggaccatgctataggaaataacagttatttaagaagtggggagatttcacttgtgttctccaaaatattgggatttttgattctgcaacagtaagatatacaatttttttccccattcttctctggatatatttatttaatttgtaaaaaaaaaatctctcatggcaagtcttctatagttatcaccaaataattctaaatttctgggaagaagactggtttgaaaatccattgattgcggacatttctaatggttgacccctctttttctcagccccaagaagctataactggatgggtgaaacatgatgtatattgcctttattgcattctatgaagaaatgaaagtcaagctgaagcaattaatgttcttttaaaaatggtctcaaactcagtatataactgttatttaactgatgatttgattaattaactgacttatggatcattttctatcttggtgaggaaaaaagtattcattgtcttttggtggcagctcttcaccaccaaaggttaacatctggagtgacacatagaagatttcttcttaataaaaagaaatccaagctatataacttactttattatttctgcttcaacactgcataaaatacatgtcttttgtcttgcaatgattacattcacaactagataagataactttaaaacaaagatagccaataatacccatcataaaacaagcacagaaacaagacaagataaattcatgtaggggtaaattatttagccttgtgaccagcatatgtgtctgatactggcattagacagatattcatatgccattatgttttgtagtaatgtaaccaagatctaaaacaggaagtaggaaaacaacccatatggtctgcctgaaatatgcttcttccggccaggcgcggtggctgacacctgtaatcccagcacttttggaggccgaggtgtgtggataatgaggtcaggagttcgagaccagtttggccaatatggtgaaatcccatctctactaaatacaacaattagcagggcatggtggcacgtgcctgtagtcccagctactcgggagactaaggcagaagaaccacttgaacccgggaggaggaggttacaatgagccaagattgtgccactgtactctagcctgggcaacaaagcgagactccatctcaagaaaaaataaaaaaaaaaataaaagaaatatgttttttccaaaagcctcactgctgatgattatggagaattcttaaacagtgactgacaacccaactgggacttctcactaaccgttgctggaaagtttcatttcacccccaaaagtagactgcagtagcttagcactggattatacataaaagtgcccaggctactcttcaggtgcaagtagttgtgtgctgacaaattggatgtctgcgaaaaaaaatatccggatttgtagccaatttccatggtgtaaatactcttacaatggccaatttccagctaccagctaactttcaaaatttcaaaatatttcataaaaccataagagacagttacaaaataccactggcctgcccaggggtcttaagagaggtcccaggactccatccacaatgtaagttgtccttcattccatatcaggaagccctcagtgtgtaagcaccatcaaaaaccattactgcctccctctacatctgtctttatttttctgacaacttagtgtttctctctggggatgtttaacaactaccctatttagtatctgagtcagtgaatagcagaaattttaattcctatttacaagtagatacattgcttgttaaatattttgtaaactgtaaaatggagaaacactattgtttttttttaattactattttctccttaatttcctctgtgagattactgatccctgtattgttctcttctttcataaacatcaagcaaacatcagacgttgctaaaatcccaactgctacatttcaattttactcctttctacagactgtgtttgaagaaagtaatttgaattatttatatccctaagtttacagctattaaatgggaattataatagctattgttcacatgagctgaaaattacaaaatcgctggatttattcatgctccatgtctaaaatgtcttcgaatcactgcatttgtgcttaattaaattcagttgttttccagttttttgccaagtacattaaagttgaagttaaaatctgtttttatttttatttgatgccaagggagcaagatatcaacatatgtcaaatttaaagggaaatatatctattaatacatacacactatcatgcaagatgttccaactgtgcacatttctcaagaggagaggagaaaaaatctacaaaaatgacttttgttgcaagaagaatataaacaagttaaaatcctttcgtgataacaaaagtctcacaaaagaggactggactttgtccatgttttaggaatttgcagatataaagagttagttatcttctactccagctctgtaatgtgtagtgtgaaaatatttgctgtcagaaaaaaacaaagtgggaaggcatagatttcactgacagagagagatcaagaatcctttcacctcatatctttatatttctaactttcatcaaatgcttgcaatatgacaaaaacattgatttttttactactctccccataaccccaaacttttaaaaaatcctgcaagcatcttgttctttggcatgaaattcactgttaaggcatgttgtaagggccctgcttgcctagctgcataatactaagcagtttagtgcagcatagctgataggctactcctttctatttttttccactaaaatgtcagcaagttttaggcaaagaagcatatgaggtaatataacacatacgccaataaggatattaatttctaaagaatgcatccaaacaattgagagtgttacaggaacactttctcagttaactccccaaagggtgtaacaaaaactaaatctatctgtaaaaagtagtttataaaacatgtattacattatgtttgaataaatgtggttttaggagtgtttttggtacactatacaaatccaactctcctaatctcagtatttgtcataaaggtccactcctcaaaaaaaaaaacaattcaaacactcaaaattgtatcatttcggtagttcgagacttggaacttttgaagactttatgtcaacagaaaaataattcagcccgttccttagcttttaggaacattactttctcaatgtcgtattaattcatacttctaaacccaggagattcagcgatatttgtgtgcagaaaaggatgaaaagtccttactccattagataaaacaatttgcatcttagctccattgtatagcacatctttatctcactttgagacttagaatgattggtgaaaattgcaagtgttgtccagtaaaacaaaaacaacaaaaaacgcagggtggtgatggtaagggtggggggtgtggaacaataggactggaattgtccactgctctctgcacagataagctaacaggagaaagccaatgtcctgaattagaagggtccagaagcaaattattttcactggagacattccttgaagtcccagtctaatgtggggtttaccatttttctcataaaatttacaatttcccttcatactgtcgagcactattggttgtaatatttgtagttcatgagtatttgtttaatgattgttttccttttttttaattatactttaagttttagggtacatgtgcacaacgtgcaggttagttacatatgtatacatgtgccatgttggtgtgctgcacccattaactcgtcatttaacattaggtatatctcctaatgctatccgtccccactctaagctccgtgaggcaaggctattatattcaatgccatgaactgtccttggctttttctgtacctcaaatctaccatgatgctaacaagttttcctctgctattttgttgttattttcagtgacgttcaccagacatggcctgactgctatctcttttcttctatccatatccaagattctcgattgacctgtgaattgactgctcttgagttaatgctgaatcctggtccaagtggttgcttttagagggaagtcagatcacgaggggcagcatctctgctgagagggctcccttctatataaaactctctgaccagccagtgttccttaaacagaggagcaaacatgtaagctgatatgcaccgtctcctctttttatcaatgagggctttcaggtactttttcacgcatcttaaaaatccaggactgtatctggcacttgaaaagttccaaccaagtcaggtaattttctatctttttatactaattttactaggtaattaactacaacacacatatatatttaaaaatatgtttatcgtaaataacaattactatgtattatggaatattcgtttttcacacttatttaatacatcagtttatatacatttcttcatggtctacataagaacatattggtctgcattgctgttacattccaagagtaattcttaaaatgttcgtcgtgtgcatctttgacttcataataaatactttaaattattataatgcatgtttgtgaatttctagttttgtaaggcagagtgctagaaatgtttcttaacaatttgtaataactcactttataatctctaataaaaataatgaataattgcaatgcatatctctagaaataaaatttctctggactatatatttggaacgaacattttagcttcttacattgtgtattttagaggttaaaatatggaaacgatcacatatcacacatttaaatttaagtagcctatgcaattaatactggaattaagtgctatgttataatattaattttttaggtacaagtgaccaatattatgaaattatttttatttttaaattttatttagaattggggttatatgtgcttgtatgttacatatagtgcttacttgtggtgtttgagcttctaagtgtaccaacaatgaaaatattgaacattgtacctgataggtaatttttcaacactcgcctcttttccacccttccgtcttttggagtccctattgtctattagttctatctttatgtccatgtgtatgcattatttagctcccacttataagtaaaagcatatgatatttggttttccatttctaagttagtttctaagttagttcacttaggatattggcctctattccaactatgttgctgcaaaaaacatgattacattcttttttatgactgcaaagcattccatagtgtacatatatcacatttttaaaattccagtcaaacattaatggacacttagtttggttccatgactttgttattgtgaatagtgctgcaatgtacaaattagtacaggtgtcttttcagtataatgatttcttttcttctgggtaagaaaatctcactacccagtagtgggatttttgggccaaatggtagttctacttttagttgtttgagaaatgtcgaaactgttttccctagaagttgaactaatttatatttctaccaacaatacataaaagttcccttttctctgcatacacatcaatgttcccttttctctgcatacacaccaacacctgttttttgactttttagtaatagccattctgactggtgtaagatgatattgcaatatggttttaatttcatttctctgatgatcagtgatattgagcattttttcatgtgtttgttggccacttgtatttcttcctttgagaggtgttgctcatgtcctttacccagcttttaatgggactgtttgcttgttttttttgaattgagttcctcatagattctgattattagtcctctgtcagaggcataatttgcaaatattttctcccattctgtaggttgcctgtttactctgctgattatttattctgctatatagaagctttttagtttaattaagtctcatttgtctatttttgtttttgttgcatttgtttttggggtcttcatcataaattctttgcctaagccaatgtccagaaaagattttctaatttttttctagtatttttataggttcaggtattaaatttatgtctttaaaccattgatatagtttggctatgtcctcactcaaatctcatcttgaattgtatctcctataatccccacgtgtcttgggaaggacccggtgggaggtaattgaatcatgagggtaggtctttcctgcgccattctcatgatagtaagtctcacgggatctgatggttttatagagggagtttccctgcacatgctctctcttgcctgctgccatgtgagatgtctctttgctcttccttcgtcttccatcatgattgtgaggcctcctcagccatgtggaaaaattagtccgttaaatctcttttctttataaattacccggtctcgggtatttctgtattagcagcatgaaaacagactaatatgtccatattgaattaatttttgtatgtgatgagagataggtggtccagtttcattcttctgcatatgactagccagctattccagtaccatttattgaacaggatgctctttctctatcatttatttttgtcaattttgtcaaagatcagtgggttgtagatatgtggctttatattgggttatctattctgttctattgatctgtgtacctattttataccagtatcatgctcttttagttactgtagccttgaggtaaaatttgaagtccagcagtaaagtcaggcaaatctagatgccttcagatttgttctttttgcttaggattgttttggctattgggggtctttttggttacatatgaaatttagattttttcccccaatttcatgaaggatgatgttggtaatttgatagagattgcattgaatctgtggaatcctttgggtagtatgaccattttaatgacattgattcttcaaatccatgagaatggaatattttttattgtgtcatctatgatttatttcatcattgttttatagttcttccttagagatttttcacctccttggttaaatgtatttctaggttgttgttgttttgtggctgttgtaaatggaattgagttcttgatttggttttcagcttgaatgttattggtgtatagaaatgcaactgattttacgttgattttgtgtcctgaaacttgactgattttatttaagtctaggagtcctttggatatatctttagggttttttgcttgtatgattatgtcttcagtgaacagagataatttgacttgttcctgtccaatttggatgctttttatttttgtctcttacctgattgctctaataactgcagtactgtgttgaatagcagtggtgagaggagacatccttgtcttgttctggttcttaaggggaatgctttcagctttcccctattctatataatgttggctgtggatttgtcatagatggctcttactattttgaggtatgtttcttcaatgcctagtttgttgatgatttttatcatgaagcaatgctgaattttattaaatgctttttctgtttctattgaggtggtcatatggtttttgtttttagttttgtttatgtgatgaatcacattgattgatttctggatgttgaaccattcttgcattgctggaataaaactcacttgattgtgaagaattatctttttgatatgctgttgcattcagtttgctagaattttattgaggatttttgcattgatattcatctagaatattggcctgtggtatttttgttgttgttcttttgcccttgcctgattttggttataagggtgatactgattttgtggaatgagttagggagtaattgctcctccttagtctttttttttttttttttttttgaataatttcagtaagattggtaccaactcttctttgaacatctggtaaaatgcagctgtgaatctgtctggtcctgggctgttgttgttgttgttgttgaaagattttttatttcttattctatttaattacacattattggtcagttcaggatttatgtttcttcctggttcaattgtggagggtcatgtttccaggaatttatctatttcctctaggctttctattttgtgtgcatagaggtgttcataacagtctggaaatcctttgcatttctgtggtatcagttgtaatgtccccttccttatttctgattttacttatttgaatcttctctcattttttcttggctatgctagctaaccatatgtcaatttttcttatcttttcataaaaacacctttttgttttattaatccattgtatcaatttattagtctcaacctcatttagttctgctctttattatttcttctgatagttttgggtttggattattcttgtttttatagtttctatagtttataatgtggatcaacattaggttgttaatttgggatctttctatctttttgatgtgggcatttaatgccataaactttactcttagtacttcttttggtgtatctcagaagttttggtatgttgttgtctctattttcattcacttcaaggaatttttttatttctgtcttaacttcattgtttgcagaaaagtcattcaggagcaaccttccttgcacttgtgtagttttgaaacttcctcttagtattaatttctaattttattaaactgtggttgaggaagatacttaatatgatttagattttttgaaaatttattggtacttgctttatggcccaaatatatggttgatttttgagaatgttccttgtggaggtgggaagaatgtatattctgtggttgttggatagaatgttatttaaatgtctattaggtccatttggtctatagtacagtttaatccatagtttctttgttgatgttctgcctcaatgttctgtctagtgatgtcattgggatgttaaagtcctcccttattgtattcctatcaatacaatagtgttttcttagatgtagtagtatttgcttcatgaacctgggtgctctggggttgggtacatatgtatttaagatatttaaattttcttgttgtattgaaccctttatcattatataatacccttctttgtcttatttttctgttgttggtttaaagcctgtttaatctgaaataagagtggctactcctgctcacttttgttttctgtttatatatcttttttcttctaatttactttgagtctgcagctgcctttagccagtaagtgagcctcttacatgcagcagatggttgagttctggaatttttgtttgttttctttgttttgtcttcttttgttttgttttttacagtttccactctatgtttttagagtagagcattcaagtcatttatattcaaggataatgttgataggtgagattttatgtttatcatagtgttgttagctagttgccttgtggtttcattgtgtagttgctttatgttatctgtgagctttgtatttctgtcatcttttatgatggtgtgggtcattctttcatttccatgtgtagactgcacatttgttggtggtctggtctagtggtgacaaattcccttggtgtttctttgtcggggaaaggttatatttctccttaatttatgaagcttagtttggcagaacacaaaattcctggctggcttttttgtttctttaagtgggctaaaaataggctcttaatgtcttctggattatagggtttctgctgagatttctgctgttagtataataggatttcaaaatgattagacccctctcttgatgctcttagagtgttttttttcccctctcattgactttggatagtctgatgactatatacattggtgaagttcttgcaatgtatctctaggaattctctgagcttctggtatctgaatgtctaaatctgtcccaagactagggaagttttcttaaattatttcctcaaataggtttttcatacattcttcttcttctttgttttcttcttcctctgtcattatgtaattatgtataacttgtaggtttggatgttttacataatctcatatatcctgaagtctttgtttatttaaaatttttttaaattgtttctcactgttaatttgaaagacctgtcttctaactctataattcttcttccacttggtctagcctattgttaaaattttcagctgtattttgtaactatttcaaaattttttttacttctagaaattctttttattttttaacgatgcctgtctccttttccatgtcctgaattttttctctgatttctttatgttggttttagttttctcttggatctcaattattttctttaaaatcagtattttgaattctttatctgttatttcaaagatttcattttgtttgagatccattgctagagagttactgcttcactttgggggtgttgtaacactgttttttcctatacttttggagttttttctcttgttcttttacatctggataagctgtctctccttcatattttttgattttgctttactttggaaaggactttttcccttcttgaggaggtgtctacaatgtatgatgttgtataaggtccttttactttgtttctgggagttttcagtggtaaagagtctggaaaaactccttagttattgaagcctttctatggtggctttctcaaatgtttgttgtagtagcaatgtgttaggcatgtgagtaggctcaggaagcttatcacattttccagagctatgcatttgtgtcagcagatttcctcttgttttgtggggttcaacctccatgccagtgggtggtgctgtagtgttagaactggctgcagccaatcgggatgggtatacactaatacttgatccttgtttactatgggaagctctgtgttacccaagacaatgggttgaactgtggaattcacagggttctgagctccctacttatctccagagtgggggaccaaggtaggcagggcccgactggacaggcctgcctcatgtctcataatggcaggcacaagcaccagctgtgttgggggattctagtgcacagccaccaaatgcccagaagtgtgcctaggcatggagttggaaaacctccactgccccaagttttctgcacaggtaggggagtatggcctaaacacaacatcaagaagagtgggtactccaaattcctggagatatatctgggctttcagcacagaaagctccactgcaccaagatctctgcacctgaagggagaggtggctcaggctccaaatttgggcaagtggatgtaccaaatgcctggaaacatgccccaggaatgcagagtacataaactgtggttgcaagaaggtctttgcaggaaaaaaggggagggggtggcttgagtgcctactgtaggggagcaggtgtgcctcatgccaggtaatacacccagagaaggaatagagaaactgctgccacagcaaggtctgcatgagaagggagggatagattgtactcctaatctgtgagagtgggcatgccaaatgcctggagttctatctgagtgtggagcagagggagtactgctctacgacgttcttttagcagaaaggggatggcagctcaagctcttattctcagggggcagatgcaccaaagccctggagctatgtctgggcatggagcagagagtttgctgctgcaccaagatctcttcatgagaagggaggaatgtctcaggctcctatccagctgtacaagtgttctaaatgcctgggactgtgtcctggtgaggagtggaaaagtcgtcattgtacaagttctttgcaggggaaggaagaggcagcttaggccactagtctgggacaaagggtattttgattgcttggaaatatgtcctctggcgaggagtggaactctccatgaggccatcggtgcgggctgggggaaagaaggcagggtggcaggagtggagaccatgggtatttgaaccacttcctcatgtaacatacttgtgccttcaggacttgtttgagcccgataatatatataccacttccatttgatgatggaatgctgttgtgcatgacccactttatggctagatgggtcagaaagcacccagttcacgacaggcagttcaggtcacatggtgacttgatgacccacagtcaaatatacagtttccaccaaagcccagtaacaggccaagagctgtctctcaaaaaagagagtagttatctgcagaagatggcagggtcttgctccaaaatcctagaggcctccactgtgtttcacctataggggcctgccaaaggctccaaacagcatccctatcttccactgacacctcaagcaccattggatatgctgggtcatatgacccaagtgtcagagcagcttgcacagcagcctggacctgttgcagagcattctcctgtttctgaccccactcaaactggcagcctcttgggtcacaccatcaatgggctggagtaacacacccaaatgaagaatgtgttgcctccaaaatccagataggcacactaggtgttgtgcctgtttcttagttgtaggaggggccaaatgcagcaacttctccttcaccttaaaaggaatatctcaacaggtcccacaccactggatccctagaaatgttactgaggttgaaagtccttcagttttagtcggatttatttcccatcctctggcatgcaaatgtctcaccaataagtccagtgtgtttgctactacttcttgcttactggatccagtcagcaaaatgccatcaatgtaatggatcagtgtgatatcttcatcaaagcaaaaagcaatcaaggtctctctgaataagattatgacacaaaggtggagagttgatataccactgaggtgggacagtaaaggtatattgctggccttgccagctgaaggcaaattgcttctattgggccttatggacaggaacggagaaaaaggcatttgccaagtcaatggctgcataccaagtaccaggagatgtggtaatttgctcaagcaatgaaaccacatctggtagggcagctgtaattggagtcatctcttggttaagcttacgataatccactgtcattctccaagatccatctgtcttctgcacaggccaaataggagagttgtgggaatcaccacccctgcatcttccaagtccttgatggtggcagtaatcttcacaattccttcaggaatgtgacattgtttttgacttactatttttctagatagaggcggctctagtggcttcaatttggcctttcccaccacaatagccctcatcctaccagtcatggagccaatgtgggggttctgccagctgctaagtatgtctatgccaattatgcattcggccactgggaaaatgaccacaggatgagaccagggacccactgcacccactgtaagttggacctgagctaaaactccattaattacctgacctctataaacacttactttgtttggaggaccacaatgatgttttgggtctcctggaatcaatgtcagctcagagccagtgtccagtagtccccaaaatgtctgatcattttcctttccccagtgcacagttatcctggtaaaaggctggaggccaccttgggagaaagactcactgcattaattgttggtaatgtagtggggtccttccataaggaggccagcctccccttcactcaggccgttctgggtctgtaaactggctcaagtctggaaattgattgagggctgggattctctttttgtaattcaaattagtgttttgtccactcgatctagaagttttctgcttgtatcaattaggtaggaatgcagtaggtttcatatcaatttcacttctaggaacactgtgattaattagtcaatgccagagctctatatgaatcagattattctgattgctgctttgcctctgctgtccattacagtagctacacccaccttgcctttgatggttgagtactgacacttggcccctgccacctcgggatccaattattcacactgtatttaaattttgtagtgagtgactgcagtgcccaccattagatctgacctacagagaagagaaattatagggctcctcaaagatgcaggtgctgccctcactactctattttgcaaggcattggtcaaggttatatcttttggaccctctgagctgggatgagtaggtctaaattgactgatctactccaccatcccaatctccctaagcttttggatcccctccctctatattaaaacaagggagatcaggcatttccagcttgctcacagtgggccatcttttaatccatatttcagctaaccaagccaataaactattagaacctttttaactccccaagctgcaacattgaaagcagagtccctacttggtgggcccaaataaatgaattcagccttatccaactctatgttccttccaccattatcccatacccttaatatctaccctcatgcctgttctccagatttctgtttatataattaaagaaatcaaacagttctttttgagtgtagcacacctcctcatgggtcacactctcaacctcacctctaggggcctgctgggactgtagttataggtctagaagaaaacaggggtgttgggagtggctcctgaagagaatcaacattttgcctggcaactgcctcaggggaggccatcactgttccctcgggcagcgtagggtttatctcctcagacaaaggtggaaaggatgatggcagcgtgggttggggaggggatgttgccactactagagatggggaagctgtttcttttcacaaaaaaggttcatcaggatttacaaactcagtggccccagcttcatcagggtcctcccacacatccccattccaagtttcggggtcccattctttttcagtcaataccctctagacactttaacagtagacacctggcgaggttgtgcatgagtctttcattgcagttcagccactctcattctaagaacttgtgtctgttttcccacaatttcagctctttctctacaggagatagaagctctgagttcatcattttctttcatcactttgtccactgaacttaggagcaaaccatcagcttcattatgttccttgattctccatatatggtcaaaggtattatgcataaaatcactaaactccttgcctctcacgagcagtgaatcaggagtatcaaatgcatttattttgcatagctctctaaacagttcatgccaaagactatcagtgttttccatactattagtagagtccttagcatttttctgtctaatcatattaagcagccacctccagaaacccaaaaaccaatgaaagaactccatccttaatattctgttcatctagaaccactcctggtatcaaaatctgtattagtcagggttctctaaagggacagaataggagatacataaatgggagtttcttatctattaacttacacgatcacaaagtcccacaataggctgtctgcaagctgaggagcagagagtcagtccaaggcccaaaactgaagaacttggagtctgatgcctgagggcaggaagctgatccagcacgtgagaaagatgtaggctgggaggctaggccagtctctccttttcacgtttttctgcctgctttctattcgctggcagctgattagattgtgcccaccagattaagagtgggtctgacttccccaactcactgtctcaaatgttaatctcttttagcaacaccctcacagacacacccaggatcaatgctttatatccttcaatccaatcaagttgacactcagtattaaccatcacagcatgcataagtgcaatgcgaacaacaaactttacattccaaaaaaatacaattgaaaaaatatagggtcaatttgtattcaagcttagtaacatagattttcagtataatcgtttttaagtttaattattttaacattttaaattcatggaagcgcattaggaaatatttacttgtaaatgtaggttttatttatttattttccctattcatttctcagaggacctgaaataattgtactttcattctaactgctgcctttcttgctaatgtttaactttaaatgtaatcaatcatttagcctaatcttaaaaatattttttataaaagtaatacatattcattgtagaaaatgcatttcttttataaaaccacatattccagaaggaggaaactaaagcgagatacagccgaagttgaaatgtttgtgttgctaaaatcttctcttagtcagacttcattgaacaagccaaacaattaacttttgtttgagggtttgcaattaacaataagacccttcgaaagtactatgtcaacattatttcagacaaaagacctctttcaatatttcacctgacacagttttacattaattccacttagcaaatgttggttgagtattgcctataagcttggcactcactgatttatctaaagtaatattatttttctctattgactcatctaaattccaatctttgtaaaatatgctcattgtaattatttaattggtttttaccttcaaggtaaatgtaaattgtatcttgaaagaattcattaaaaatgaaaatatggcatattatatttgttcctcatatattttataaacatataattatctatcatctatcttatctatctatctatctatctatctatcatctatctatccacctacctatctatcctgattatgcatcccaatttagagtttcatagaccttctctcaaagagaaggcattctgtcaataaaatgaaatcatgtaggtgtcttctattttacataatagttgattcaaaatgggcaaaattgtattaactacagtagctactggaaacttcatttaatacaaaggctagaccaaaaaaaaaaaaagccatgcccagtgatctgaataccttacatattagaaaaagggcacagtctacaaaggaaaacgttctaaaaatccttggagaaattgaaattcatgggaaatataaaccaaaggcttttgaaattagaaaattcatctttgtttaaatacatctaataatgcattatgggctgtaaatacatttccaaaacttataaagactagaggataacattccattctagtaagttgtcttcaatggaggaagtgtataagtgatgccaaatcctcagttgccaataatattctttcaagcagctgacctactttccttagggcaaggctctagttttcccaaatgattgtcatttggatttcagaataaaataatttatcccttctgttcatagttagaaacagaactgagaacacaatggatattttttcttttcagacaatgggtatttttttcgtttgcaaatctgcatttataaaacaatggtgtggtagaaagtcaaacaccaaattaacgaggaaaagtttagaaacgttttgttacattttacatatttcaacgtctcaaaagtggcatcacgataatgcaatagcttgtctaaaaaatgaaaaaaataaataaatgttatattttgtatataatgctagaaaatttgaacagttctagaagatgcacaaaatggtgatcttgaggaaattacacatggagttttttaaggattcgattcccatattaaagccaataccatcatgtgaggtcccatatttaaagtttaatttctctgtgattatttacataagaatagctccatttttcaaaactttcctttcattaggaacagaaacaaatgtcctctaggaatgaatgaaatatttttctctactattgctgttgtttttaaagttgaaaatttacctatttattaaagtcattccataaccttatccaaccccaaatctgtacatttcacactttgtagaataatgagttgaaaagaaacccagtggatttatgtatgtgtgtgtgtgtgtgtgtgtatatatatatatatatatatatatatatatatatgtacatacattttttattatgtgggttctggcaaatattttagggctaattttttagctgataaattttagtactatagcaatatttggttatgtcaaattatgtgaaattgtgtagtgatttctaggaataaaatattctgaaaatagcagttgtgaagggaagtctaggttagcctcaacttactgaaagtgaaatcttttgaatattcaaatgaaaaaagtaagagtaatgggaatgaaaaataatcaggacacacaataatgaaaaaatgaaataaaaaaattgtggaaatagtaaatataagacagaaaataaaatctaaagaaattttatttaactgggctactgttggtagcaccaggtataaacaacctttacttcaagcttcagatatgtttcaactctcattcttgttgaaggttgattctatgacctaaaatgtcatcataagaagaatttgtcttttatctcgctttaccaagcactcattatcaagggtggaccaattaataactattctagcaacctgcaacaacaaatatgacattgctacgttttcgccatgaatctcatttagatttttttgaagatatttatctagtactttgtgttgagttgtaactccacgaattagccaaaagtataattatgtcatgggcaataattgcatgactgactgaagtcttagggatacagttattcttgcagatcataattccctaaaagagaaagtttgttctaaagttgcatttctagaattccgtttggcagcaatactatattactgttgtttaacttgggagccaaaaaccttagaactgaggggatgattcttttaaaagcatagctggaagtttaatagtaaatacattaaacaatttctgcttattttctctaagtgtttgacatagtgaggtcatttgaaatccaatttaatagaatcttcacagaatattgggaaattagtactatcttgactcaacactgactgcccttgcattagtaactgatataacattgaccttaaacatagctcttgaaatggaaatattaaaataggaaggatgtgtattttattccagagtggcaatcttttacttcttaataatcatgtcctaataatatttttttttgagacagagtcttgctctgtcttcaggctggagtgcagtggcgccatcttggctcactgcaacctccacctcccaggttcaagcaattctcctgcctcagtctcccaagtagctgggattacaagcgtgtgctaccatgcccagctaatttttgtatttttggtagggacggggtttcaccatgttggccaggatggtctcgatctcctgatctcgtgatccatctgccttagcctcccaaagtgatgggattacaggcgtaagccaccatgcccagcctccattgtacttattatactcagaggatgctattcagacatgctaatgaaaatttattttatatttaaaaactaatgttttcatataacacagccatgaatatcattcagaaaaacaaattgacaggattaacaaatgcagaaagcaaatgcagaaagcagcagcaagaaggcaaatgaaggcatgcagagaaaaagagacttatgaaagctttcctgtctagttctttgataagaacttaacatcagtgagaaaattgaaaagcccagtctttggcaaaaagattaaaacaggccttggcactatttgtaagcaatttagattatcagaggaaagacaattctttgaaataatatataatgagagacactgatgcttctttacagcttcatagcagatcaacaaaaatcatgaatgccaatcatggctatttctcaatgtaatgttttgtcagtaattccttcagacaggtgttatccatgaaaatgaagtgtataatttaaatttttctaaatgccacattaaaaatgtaaaaaagaaacaagtaaaattaattttaagaaatgtatttttgtttactcaatatgtccaaaaattttcatttcaatttgtaatcaataaattattaatgatatattacacattcctttttgattatatgtctgcataatatgttatgcattatgcttgcaacccatctcgatctgaaacagtagcattccaagtgtttgatagccactgcctagaagttactatatcagtcagcatggcgatggacattgaatacaatgtttttcaaagataatttaatttgaactaataaaaaataaagtaagaacttctgaaaatatttagaatagcttggataggaaagccaaattagtgcaaataagattaaggggtcaaatgaaaaggggagaaaggaagagaggtttaacttaactgcaaagcagaattttggagaattgcagctaatgacaacaaattgttctcataaattatgacactatatagctatgtggttatgatgatgacaactttagaataatatgtaaagagctgttcttcattttatttccacaaataataactgaacatctattataggcttggtcatgacaatatgatggtgaataagcagtggttcttcccttcggggacataaagtcaaatagggagtgatggcattttccatttttgtgacagattaaacttatttggtaaacaaatggaagacctagcaaggcaaatctagtggaaattaagaagagcaaagtttgttaagcacatctgtatcacaaacagaattgttcagaaaacaactcagtagccctgacattatataaaaatcctctttggttggactattaagggaccctgtgtaaccgcatatagaaaaggacatcaaagagattcctgagttgtgttggaaggcgttttgcatgatacctaaaattctttccagccatatagtagtatgattatataattattgtgagaaatatcttatttgaattatttttatactgtgatgattatttcaaattatttgaatgaaattaaatatacatagaactcacgaatcatttgatttatcaaataccctcaggtattattttgacatcaagaatttaacaacacattaataatgcttgttaatagaaagtttagaaaaccttttgctttctttaaagcacttttcaccgtgattccatcctttggaatgactgtttctcctccaaatcaacatcttattatttttatatcaatcccaagttaagtcaagagaatgagaggaataagaaaatgccattgcttttaaaccaaagggcaatatgacaaaaaagaggaatttttaaattatttgcaaagtaaaaattctaaatgtctttttactgctttgtttaagatattgtttaaactcaaacaatgagacatttgatactttactgtctattcagccgtgtgtctgtaaacatttacacaaatttacatcaatttctatttgttctatgagaacatgaatcccattaaaatggctaatgtatagatggaaacttccattgctactattcttcaggtttttcttattgaaaagtgatttgcgtttcctttttgttatataaaactttgtattttgctggttagccttaaaatgattccctaatcgaatatctcttctttcaaatttcggtgtttttaagaatatataaaatgagtctagtaatagatctaatggaagatactgagcatttaaaagttaaactgtttacataatagtaatcatttgcttatgtaaataggaaaagaacgtggttaactgcctgcacacagcaggaaatgcaaacatgaagactcagttctgtcttagaactgatggagtgaattgaatgtgtacaatgcagaggtgttcattgcaaagcagtaacgtcagttatttcaatacaagagacataaaaatcataaacaacaaacattaagcatgctatgaaactgaaaatctttaaagaaacatcattgagcaatggtgttgtcttgtctattatagttatgtggactgagctaaatattcacatgacactgaaataataagaacgggaacaaaagcatttagagggttataatctaatatacggtgtcacaaatcaaatcctttacaaaccactgggagacaatatttctgtagtgtttttgttccatttgtacgtgaagaagttagtgtgtcttttgttgtttttgtttgctcaatcacgtttttcagcaatcaaagtaaaatttgcaaatacctaaaaataatggcttcttttataaagcaatattgtaattaagtaaatgtgaaaatataaatcaatttttaaaacaaatatgagaagatacgttcattttcagattagcacacacacacacctataaaaaataaagtaaaatatgcctgtaaaagtaccaatcttggtttttctaaatatttcaacaatttctaaaataaatattaaacttttactctattaacaagacatttgtatatttctcattttggaaatatattttagtaaaacttattttgaagtaagcataggtagtctactactttctagtgccactagtgatcctcattctagttttctgcccacagccatatcctgttctgttgttggatttcattcttatactggttgcctcattataagataattaccttgcctcaacatcatgtttgagctctgtcatggtttgaattgtgtcgccccccaaaaagatattggagtttcctgttttagttcttttggaccgttataacaaaatgtcataaactagatagcttataaacaataaaatttatttctcacacttctggaggctggggatgatctaatcattaccccaaaggccccacctcctaataccatcaccttggatttaggattttgacatatgaattttgggggaacacaaacattgagaccacagtactctcagtgcttcagaatgtcaccatttggagatagggttttacaaattaaggactaacccaatatgactgatgtccttattaaaaagggacaatttggacacagagacagaacacatagaggcaacacgatgtgaagaggcacagggagaaaattgccatctacaagtctgcaccatatccttccctcacagccttcagaaggaaacaagtctgtggacaccttgatgctggacttagaggcctccagaactgtgagacagtaaaattatactcttcaagccaattcaagccaatctctctgatgatttctgctcaggtctctttgtccggaataagtttgtataatcaccccaagatgctaataaaggtgtggtggtgatgggagacaagaaaagatagcccattcttatttttgccttttaaaatttcagtactgggacatttcttccttgaaaaaataaacttttttgttgacccatacaaaatggaatgatagcagtgcccaccgtaacagagacttcatttatttcaccacttgtacacattttcacttcatgtagacatctgattgttctatgagagattctatgattgttctatgagacccagctatatttatgaagatgaatattatttaaacagatagataagattaaaagagaagatagactgggaaaaggatacatttagtatagatttcggggagtttgaagcaaggcaactatgatataattctagatgtattatttacattttataactttttctttccaaccattctccacacttcatctcacaggtttttaaaaaactaatctatttactaaatagtatgccactgataatctggaaacatccaataccaagtatttttgattataaacgtattcttgtctttaataaaataaatgataaaatgacaatagggattgagtttggcactgtaaatttttgtaattgcttgattcctgctaatattaatgaaataatctaatgcttcaaaattcacttattgaatagtcatttcagtgctggtattatccttgattgaagaagacactattatccaaagtctttaaacagatatttactaaagaaaatattccttgtgatgagtctaaacattgtcagaggataaattttctatgtgaaacactagtaatattttgtatattaaggtatttttaagcttggagttgcttatgaatgctgttacctgttttactcatattgtagggatgtcttactgttctctggtctcctcattcatattataaagttgtagctggaaagtaggtgccaaactagtcattatattgtctgtcttccccacccctaacagccccctttattgctatatgtagaagctactggacctgactgaatgcaagtacaagtggtatgtgccagtttaggaccaaagctttcaataagtgggtgtgctcctttctgaactgggtgcttcaacttctgctgtctgattgttgaagacagtgaggcccaatgggatggtggaacaagagagtgaaaggagcctaggtacatgaatggcagcatgcctgaaagcaaatccctcaactggaagactttgcccaagattaaaatattaatgggatcaaaacttccattgcttccacctctatctctttggatctgtttttaaagcagttagcctactcaaccaatgaggctttgtttttttttttaatcaccattcttataaaaacctttaaatgatgaattcgatgttttctagattgcaatttccaaaacagcagggttggtgtgtaatttgtgcacttttgggaacgtacagtgcttgtcactttgtaaatgcttaatagatgtgtgatgaaagaaaaaagaaaacattctagaatacactgaaaaagttatgtttagttttgtctgactcacgagtaaacatatggctcttatgtttttagcaaatatcaagttttgaatttcaacccaagtaaaatgtttctcccgtggctccctgacagaacattcccagctgtttcaatgcagagctctgacagcttctagagcaagagtcaatattagttaatggtccagctgcagttgcgactattttatttcatcacaatgacaacttagattccttctcctactatttcctttgagattagtgctgctgaactttagtattcacagctactcacagagctgtgactataaaccctttcgagttattcattattagttcctacacaacatgttctaattaactcataataaatcctccaaaatactgcatatgttacatttttcattaggatctaattggaaggaagctgcatcactttccttctgttagtaagccatctttctttacattgcatgatgcattttagtttgacatgacgattattccattccatcaatgacccagattacgttcttccttccgtaacagaatgtattgtaaaataatgaaactgaaactgcaaggcagagaaaactacacacacacaccatgatgtgatcgctgaagacttttggtatgagagtgaatatgtgcatgtgtgtgcatgcaataatgtgcactctatttttatgtattgtgttctgaaaaactatcttaatagacttcttttttttttttttttttttttttttttgagacggagtcttgctttgtcaagactggagtgcagtggcgcgatctgggctcactgcaagctctgcctcccgggttcacgccattctcctgcctcagcctccccagcagctgggactacaggcgcacaccacctcgcccagcttatttttttgtatttttagtagagacggggtttcaccgtgttagccaggatggtcttgatctcctgacctcatgatccacccgccgtggcctcccaaagtgctgagattacaggcgtgagccaccgagcccggccttaacagacttcttaatagacccttaatattaagaaaaacttaatagagcctctttagatttgttattagaatactgaattcattggaagaaattctagcattgttcttttgattgtgtgttttctggaaagaactttacttccacagtagttaaaataacatacagatgaagaatatatatgcttgttaatcttatgtgttgtgtatgtgtgtgttgtgtgtgtgtttggttcttttgtgctgtgatttgttttaaaagaatttcagtacaatcagagaataacaatcttagaagacatattacagttcacataattaaacctctcactgttggaggttcttgcacagatgttgtaaaaaataaaaacaaaaacaaaaaatgaaacatctttgtcagatgaaaagtgccattgctagtctttcttcagtaatgttactaaataaatgtcaggcttacctcattcgtctatggttattgtcagactgactcatgtttctgcttaaaaataataataaaaataataataataaaagctgccatagttgttatgaatggtttagaatagtgtagtcactttttaatttgaaatacagaaaataaaggagctttgaagccgtgttcagagtcctataaatttgtatactcaaagatgagattattggcagagggcatatgtaggtagcagttagtattcctcaaaatacgtacacccacatctcagaaatatgggtaagtttagaaggtggtagaaaatatatttacataactgttaaagctttctaaaacaatttttaaagcatttcaagttttctaaaaaacaatctagcatttaatcatcactttagtttaagatgatgtacgtatataaaatatttagttatttgaaatgctttccactgatgtctttgataaacgtttgatttaaagaaataataatatgggcagagcaaaaacaaagtgtttctcaaattgttgtaacagctatattatttataattgaactaaactagtcaaagctcttaccctgtctggttgtgacaacaaatgttgtggtcagttaaatttactttgaaattctttagatggaaactattttatagattccaatttgtttgcttaaaaaatatacatggcaatatctatgttcaattgtacagcagagattctaaaactgtccaaagttgaaagttaaatcctatatgcatatgtattgtatttactcagcatgatgttaaattttaaagcagcatcacaaaatgaataaaataatttcatgtgttccaaaataagtgaaaagccagtgtttcaccaccacttctcttaatcgctaggattatgatatgcggaatcatttgagaggcagggcatgagattttgagtaatgaaaaacatcttgaacaaaggctttgaaatgggggtgaatcatggcatttggatttgctatagtgagaaaatctaggtataaagggatgagaagcaagactaaaatgacaatagagggattgcaaaggaaataacagatactcatatctagaacactgacagagcttggagcatttctggaagtagggaattaaagagaaatgaagaatcaaagacaacaaaaacataatttggacagggaagattaaaagtatcccaaagattatagagactgtaaaaagatattagcttaagctttaagaaaggaaaccacagcatgttggacattctgggtctagctaattatagtttctgagaaaacatggtggagataaaaaaaattgctcgtctctcaaattcaagataaaatatgcacattttcttcaaaattataaaaaaaaaccactattttcacatgttattcatggagtctggaacatttttgaaacaagtgcattcgtcagtctttataactgtagaaaaattatatggtaagtatgattaggatcaaaataattacccttgcaaatcaagtaaaagtagacaagcttttaatattatattttcaaatagcctgaatctaaaattttaattttacacaactgtattctcatttaagaggatttaaggggaaaaatacagtccaggccaggtggctcacacctataatcctagcaatttgggaggctaagacagtaggatcactacagcccaggatttcaagactagcttggaaacatagtgagacctcatctcgtcaaaaactaaaacattagccaggcatggtggtgtctgcttatagtcccagccactcgggaggctgaggtaaaaggatctcttgagcccagtaagttaaagttacagtgagctctgatcctgccattgcagtctagcctgggtgacagtgagatttcgtctcaaaataaaaggggtggggaattagtaacattttcttatctagcccattcctctctttgacaggtattttaaaaagcaaacaaccacaaccaaacaaaacttgattggccaagtctcctaagttgtagttgttagtgtcattggtttctcaagtgcttttagaagtttagaaggctggtgtgtgtgtatgtgttttctacaacttactattcaattattttttaagaatgcgtaaataatcacttgatgttattatgcctaatagatgatgtttaacacattgacaaaaagaaaatatgtactcatacagaaatactgtgatttaggtcacttacatacttgggaggagcaaatcctgctgattttgagtgtgttgaaatgctgaagctatttttcacatgttttgggtctgtttcttttttttaagtttttttttttctcattatttgaaaacccaatggaactgtaataaaactgggaaaatgtgatccatatgttttggaatcttttacaattaaatcatcaaattaccattcaaaatattttgaacattgaatataaatggcctaaatgctccacttaaaagacacagagtggcagaatggattaaaatccaccaaccaattacctgctgtcttgaagagactcacctaacacataaggactcacataaacttaaggtaaaggggttaaaaaaagatattccatgcaaacggaaactaaaagcaggaacagttattcttatatccatcaaaacatacttaaaaaaactatagttaaaaaagacaaaaagggacattatataatgataaaaggattagcccaacaggaaaatatcacaatcttaaatatgtatgcaccgaacactgcagctcccaaatttataaaacaattactactagaactaagaaataagataaatggcaacccaataatagtgggggatgtcaatactccactgatatcactagacaggtcatcaagacagaaagccaacaaagatacaatgaactaaaactaaaccttagaaaatggacttaacagatacttacagaacattctacccaacaaatgcagaatatacattctcttcatcagcacatggaacattctccaagatataccatatgataggccacaaaacaagtctcaataaatttaagaaaatcaaaattatattaagtactctgtcactccacagtggaataaaactagaaattaactccaaaaagaatcctcaaaactatacaaatatatggaaattaaataatctgctcctgaataatcactgggtcaacaatgaaatccagatggaaatttaaaaatttttttaattaaatggtaatagcaacacaacctatcaaaatctctgtgatattgcaaaagtggtgccaagaggaaacttcatagcattaaatacctatgtcaaaaagtctgaaagagcattaataaacaatctaagctcatacctcaaggaactagagaaataagaacaaaccaaccaaaaccctacagaaaaaaaaaaaaagaaataatgaagattagagcactcagttccacatggctggggaggcctcacaatcatggtggaaagtgaaggaggagcaaaggcacatcttacatggtggcaggcaagagagcatgtgcaggggaattgccctttacaaaaccatcagctctcgtgagagttattcactatcatgagaacagcaagggaggaacctacccacatgattcaattacctccaacagggtccctcacatgacatatggggatttggggagccattaggttggtgcaaaagttattgctctttttgctattacttttaatggcaaaaaccgtgattaattttgcaccaaactaatacaatttaagatgatatttgggtgaggtcacagccaaactatatcaacattagtgagattaaccaagaaacaaagagagaatatccaaataagttcaattagaaacaaaatgggaaatagtacagaagatgccacagacatacaaaatatcattcaaggctactatgaacacctttatgtgcataaactagaaaacctggaggagctgaataaatccctggaaatatacagccctcctagattaaactaagaagaaatggaaactctgaacagaacaaaaacaagcagcaagattggaattgtgatttaaaaattaccaacaaaaaaaaaatgcccccaagaccggatggattcacaattgaattacagcaggcattcaaaggaggattggtaccaatcctattgacactattccaaaagatagagaaagagggaatcctccctaaatcgttctatgaagccagtattaccctaatacaaaaaccaaggaagggcacaacaaaaaaagaaaactacagacagatatccctgatgaacgtagatgaaaaaatcctcaacaaaaaactagctaactgaattcaacagtgtatcagaaaggtaatccaccatgatcaagtcagtttcctactagggatgcagggatggtttaacatccacaagtcaataaatgtgacacaccaagtaaacagaattaaaaacaaaaatcatgtgatcctctcaatggatgcagaaaaagcatttggcaaaatccagcatctttttataattaaaaccttcagcaaaattgggttagaagggacatatcttaacgtaataaaagccatctatgacaaacccacagccaacattataccaaatggggaaaagttaaaatcactccccaagaactggaggaagacaaggatgcccactttcaccaacttctactcaacatagtactgaaagtcttagccagagcaatcagacaagagaaagaaataaagggcatccaaataggtaaagaagtcaaactgggaggcagagcttgcagtgagctgagatcgagccactggactccagcctgggagacagagccagactccatctcaaaaaaaaaaaaaaaaagaagtcaaactgttgctgttagctgatgatgtgattgtatacctagaaaaccctaaagactcattgaaaaagctcctagatctgatcaatgaattcagtaaagtttctgagtacaaaataaatgtacacatgtcagtagcgctgctatacacttaacggcgaccaagctgagaatcaaatgaaaaactcaaccccttttacaacagctgcaaaaaataaaataaaatgcttaagaatatacctaaccaaggaggcaaaatatctctacaagaaaaaacacaaaacactgctgaaagaaataatagatgacacaaacaaatggaaatagattccatgcttatggatgggtagaatcaatattgtgaaaatgaccatacttccaaaagtaatttacaagttcaatgcaattcacatgaaaacaccatcatcattcttcacagaacaagaaaacaaaattctaaaatttatgagacaaaaaagagcccatatagccaaaacaaaaatgaaccaaaagaacaagtctggaggcatcacattaccgaaattcaaactatactctaaggccataatcacccaaatagcatgctactggtataaaaacagacacgtagactaatggaacagaatagagagcccagaaataaagccaaatacttacagccaaccgaacttcaacaaagcaagcaaaagcataaagtggggaaaggacaccgtattcaacacatggtgctgggataattgacaagccacatgtagaagaatgaaactggattctcgtttctcactttatataaaaatcaacccaggatggattaaagactttaatctacaatgtgaaaccataagaattctagaagataacattgaaaaattcttctaggcattggcttaggtgaagagttcatgaccaagaacccaaaagcaaaagcaacaaaaacaaaaataaatagatgggacttaattaaactaaaaagcttctgcacagcaaaagaaataatcagtggagtaaacagacaaaccatagagtgggagaaaacttttgcaagctatgcatccaagaaaggactaaaatccaggatcttataggaactaaaacaagtcagtgataaataataataataatcattatcatcatactcctcatcaaaaagtagtctaaggacataaatagaaaattctcaaaagaagatatacaaatggccaacaaacatatgaaaaaatgctcaacatcacaaaatgcaaatcaaaaccacaatatgataccaacttactcctgcaagaatggccataattaaagaatcaaaacatagtatatgttgccgtgaatgtgctgaaaagggaacacttttacactgctcttgggaatgtaaattagcaccatcactataggtaacagtatggagaatccttaaagaagtaaaaataggagtaccgtttcacctagcaattccacttctgagtatccacccagaggaaaagaagtcattatataaaaaagacacttgcacatgcatgtttatagcagtataattcacaatggcaaaaattaggacctgcataaatgcccatcagccaatgagtggataagaaaatatggtatgtgtatatatatatatatatatatatacaccttgaatactactcagccataaaaagaaacaaaataatggcattcacagaaacctggatgaagtcggagaccattattctaagtaaaataactcaggaatggaaaactaaacatcatatgttctcactaataagtggaagcttagctatgaggacgcaaaggtataagaataatataatggactctggggactttgggggaagggtgggagtgggatgaaggataaaacactacacactgggttcaatgtaaactgcttgggtgatgggtgcatcaaaatctcagaaatcaccactaaaaaactgatcagtttaaccaaacaccacctgttcccccaaaaactgaaacagtaataataatgataaataaaaatttaaaaaaacaaaaattaaaataagagctctttttcaaacatatacacctacacaagaaaataatgtacaattcataggattgtgttgcttaaatattttatcaaatatttattttatttttagtgttgaatggcatatcaaataaatcattccatgatattaccaataatatatgattataaaatgatcaagtggctgggcacggtggcttatgcctgtaatcccagcactttgggaggccaaggtgggcggatcacctgaggtgaggagttcaagaccagcctgcccaacatggtgaaacctcgtctctactaaaaatacaaaaactgagccaggcgtgttggcaggtgcaagtaattccagctactgaggaggctcaggcagtagaattgcttgaacctgggaggcggaggttgcagtaagctgagatggtgccactgcactccagcctggcctacatgagtgaaactccctctcaaaaaaaaaaaaaaaaaaaaaaaaaaagagatcaagcatcatttactactaaataggcaaaaactttttctcagtgctcacttatctatcaccaattcgttatccaaacatgtcagcatttgctgtaaacaaatccaaacatggacaaaggactctcaaatgcattcaaatctattaccctttactgatgtccttcagaaaaaaaggcaacctttttaggtaaacaatatgagaatttgatgtttggtgtctttattaacatatctactggataaattattcattttgtcacatttaactttaaaatacagtatttttataatctcacaaaactattttagtaaaaaattgtttttctattttttaatttaatttattattttctattttatttcagacagagttttgctcttcttacccaggctggagtgcagtggcgcagtctccgctccctgcaacatttgcctcccgggttcaagcgattctcctgcttcagcctctggagtcgctgggattacagccgcctgccacgcccagctaattttttgtatttttagtagagacggagtttctccatgttagccaggctggtctcaaaattttttaatttatttactgagtaagattatctatttcctgacctcgtgatccgcccgcctcggcctcccaaagtgctgggattacaggcgcgagccaccaagaccatcctggctaacatggtgaaactcccgactctactaaaaatacaaaaaaacagctgggcgtggtggcgggcgcctgtaatcccagccacttgggaggctgaggcaggagaatcacttgaacctgggaggcagaggctacagtgagccgaggtcccacaattgcactccagcctgggcgaccgagcaagactctgtcccgcccccacccccgaaaaagattatctatttccatatctaatatctaccacttgtctctggcattgaacagggtatttagataaacaaaatctcatgttgttggaagaatttcctactttgcaatttgcagtaatcacggccactgctggatctgatatatcgtttcactttcacaggtgaggtcagttaagttccattcactgagaataattcaagggtgaggcttttccaagacatctcttcctcacctacctacctatcggtattggaactgtcctttatctttggagagcttttccttttcttagctaaaattgaaggaattttaacaaatatttctgacattagcgattatttattcaagcaactctaaatttgaatgctgcaggaaattataaacagtgaaagagtagcagcatttgttattcctaacaaagcatgtttactgcagtagcagacaaactttggataaacacttgagaaaatataaattatagggcatagctaagaaaacattcttaaacatagtacgtttcatttatagaaaacattggtgtagtctttcttattataaatatgctttgcatttgaaacacagtttttaatttccaaaaatcctgtatttttacgattctatttctattataagcaaaaatgtaaaagaatgtcacatattacttctgagtagctgcactgttacgattttctgtgttttaggccaaagactattaccgtaatgactactgtgtgaatatgtaattacacacgtactgctactgttgtgtagagataacatgatctatttatgcaagcataaaatatggccatatggtttatattccggacttgcatattatgaaatcatttgtagccctaccctgaacttccacagagaaaaatcacacacatgagatacacacatgggcattgtggtttcaaaactctttgtggaaaaaagctgacataaacaaacgaagcagaaatctcctcccttcaaagtggtgaatattatgtcttggaaagaaaatgaacctgggattagacagatggaactgtagcattacctatgacaaattattccgcctccctgaccctaagctgcttcattctaaaagagaaatcagattattcaacttttctatacatctgtttgaaaatgctaggaaaatagtagacatgcaataactggttgtgaatgtttttctttttcttccaatcatgccaccatatctaaaatgtcactttatgtcactatgctttttcacaaaaggttaattaaaatcaaagtaaaggttataggcaatatcatgaaacatgttacattccttatttaaaaacttgataagaaactactatttactagcagattcaaatatttaccaatgagtattttagctaaacttaaattctgtatataagaaaattaagattattatcctttagtgaactgataataaaatgtagatgatgacccagtacattctgtgacatttatccaaatgagttgaaaacttatgtcaacacaaaaacctgcacatggaggtttactgtagctttattgataattccccaaacttggaagcaaccaagatgtccttcagtagaagaatggataaataaactgaagtacattcagatgattaaatattattcagcgataaaggcactatcaagccacaaaaatacatggaggaagacaacttaaatgcacattgctaaatctgaaaaggctacataaaagccaatctgaaaaggctacctactgtataattccaactctatgatattccggcaaagaagacaccactatgaagaccttaaaaggaaaagtggttgccaggtatttaaggggaggaagggaggaataggtggaatacagaggatttttaaagcagtgaaactattctgcatgatactgtaacggtgggtacatgccactatacatttgtccaagcccataaaacacacagctctaagagtgagagttaatgtaagctgtagactttgagtgatgatgtgtctgtgtaggttcatcagctgtgacaaatgtaccactctggtcaggatgttgataatgaggcaggctgtgcctgcatggtggcagggttatgtggggagtctctgtaccttcctctcaacttgccagtgaaacaaaaactaccctaaaaataatgtctattaaaagtgcaggtgatgaacattaatttaaaaatttagtatttttacagggacaatatattcagttatttgttgtgtacataaaattaacataatttttttaaaaaaatgatgaagacctatattttagctgaaaatacatagaaacaatagtcattacattaaatatctaagagaaaatatgtattatgtcatgcaaagagtcaagaagatatacatgcattcatgcatatacattttatagccatatggttcaatatcaaattgagcttacggagtaaaaatggatgaacagagatgttgcaacaagcacataaatctcacaatgtcccacgtgtaacagaagtgtaagccagcactccagataagcatgtaacattgcaggtaataagaaaaaaaataatagactgaaggagcataccattgacttattaagcgacaactattgatacgcgctagctggttgatacatgtaacttcatcttcatagtaatattaattttaagtaaatattcttgtcattttattggtaacagaatggaggctccaagaaattaaataatcttcttgagatcacatcatcaacattacacatgtgagtatgttttaggaattggattataaaaacggagtaaatctacctcagtgtcaatatgtttttcattttttgtcatatgcccttcaacagttatgctgcagcaaggaacaatacacatttatctcctaaataaatagcctatacgatatttttgcatcccgatcttttaaactgttcaaatatttgaaattgaccattatataaaccagctcttccccattgcttttaagatgaaagttactttccttctctgagacttggttttttcctttgtgaggagaatactactaattactttgtagggttgttgtcagaatggggcagctgatatttaatgccccctccaaacacacaaccaaacctgaatatgaaacataaaaaaaaatacactgaagaatcaacttatttgtaatttcattaatttcttaagaaaaaaagaataatgccagtttgcaagtcagattatgctggtataattaggatacttatgctcctgcctttcactggagcatgtttcctatcttctatactcatcaaatctgagggaactccaacttaaacacatttttaccctttgtgctgctgccaatttcaacctttgctgaaagcactcacaaatactatttttgtcatgcttgttttgagtgctaaaatcttcatactatctccctctagaaacaacattttcacttttgtcttttactgctttttattatttatttttttatttatttttattttttgtttatttatttatttatttatttttgagacggagtctcgctctatcgcccaggctggagtgcagtggcgtgatctcggctcactgcaagctccgcttcccgggttcacgccattctcctgcctcagcctcccgagtagctgggactacaggcgcccgccaccacgcccggctaattttttgtattttttagtagagacggggtttcacggtgttagccagggtggtctcaaatatcctgacctcgtgatccgcccgcctcggcctcccaaagtgctgggattacaggcttgagccaccgcgcccggcagctgctttttattatttttaaaattattctccttatttattcctctcttccacattaagcaactttccccagccagtgagatttggaaaacactgctattttttttggtgaggtatgactatggctgcctcatgtatggcagctacattaactactgcaatcttcataatggctctgaggtgggtactgttattactcacccccgcacagatgaggaacctgaggccaggttggggaaggcctaatccaaaatcacagagctagcaaaatctgggcgtgactgaaatcttggagggctagcttcaaatactgtgtgtttagctgttatactaaactgttacttatctatactcttttatggacaattttataaaggaagctgaggatatatttttaataatacataatgagaaagtttatagaaatgcatcaaatgcattacgcatgaaggttaaattactaaaataaaattaaaagctggatttccttaattatacatacatgtagcccaactgaaatactactgtaatttctctaacacatttttaaaaacttttcacacagtatattattagaaagatatgaaggatttacagggaaaaacagccccattattgtctggctaacagttttatttatttagccatgtgtagaattaaatttcagtcattaatttagccttataatcaaaacttttgaaagacttagtagattctttcttaagagattactaggcttgttgtgaacccatacaagttcgtgcactgaaaatcttcacttaagtctctttctaatgcatttctttacacacaaaggcttatatcaactcctgtgtacacgctaaacaaatatccatgtagaagaaattacttaaacagcatgaattctatgtgggtaaagagttcataatttgtcaatctcttagaaaatctaggaaatatatattcataaaatcaagagaatacatttataaaatcaagagaacagtgagaaaaacaggcaatctgtagcttaatacaaaaatacttttaacaaaataaattagctaaaagacaaaatttagaatgaataatttattaattgattttcattgaagaactatgtcaccatcagggcagataattgattttaaactatactaaattatattttagtttttatttttttagaagtcaagccaggtgtggtggctcacacctgtaatcccagcactttgggaggctgaggtgggcggatcacaaggtcaggagttccagaccagcctggccaatatggtgaaaccccgtctctacttaaaagacaaaaattagccgggcatggtggttcacacctgcagtcccagcttctcaggaggccgaggcgggagaagtgcttgaaccagggaggctgaagttgcagtgagccaagatcacaccactgcactccactctgggcgacagagtgagactccgtccccccacaaaaaaaagaagttaaagtcagagatagcaggtctaaatcttgaatgtcaaatttagttgttgttgttgtttaatttgctttgttttaaagttattaaaaaattatctaaccagcagcagcagtacagattacacatagccccaacttacctgggtctttgcgcatttctttcaattacacaagagtattttaaccacattattggttaccataattttacttgaaaaaatatgcaactagttagcatataaaagatctgtttttatggcagtttataattatatctactcaaaacaagtcattcagagaaacagtaattcaaacttactctaaaatgttcacaaagcatttattccattaaatatttataatatttaatatataatacaaacagtccccaacttataatattggcttagaatttttcaactttatgatggtgcaaaagtgataagcattcattagattccatacaatcattctgtttatcactttcagtaaagtattcaatatgttatatgagctattgcacacttaattataaaataggcttactgttagatgattttgcccaatcataagctaatgtagatgttctgggtatgtttaaggtaggctagtgtagataagctatgatatttggtaggttagatgtattaaatgcattttgacttactatattttcaatttaagatgactttattggacagaatcctattgtaagtaaataagcatctatattacttataaataatatatttaatgtgttaaaaatatattcaggtagaatatttttaacattaaataattcattttagcctaaatacatttacagcaaatgatcatttatagacaataaacaacagtgctaggtcaatgacatcagaagcattttgcgtgaaggctggaattattttgtttttcacatgatatcacaggctataatgtctttagcatagtcggtgctagccatttagaatcataatgatctgttctaaaaggctgaaaatattcttttcatttctgcaaattttagaaatatataataatcgcacctggaactagattttggacattactccattctgctactcttttttactaagatgaaagctgaaatagaatgaaaatttttacttttttgatctcatttcaatggtacaggagaatatgagtattgcctggacacatgtatgtttgtaatgaagccttaaatatagaaatgcaacttgaaactgatgtgaaagtagttaaacctgttgtgttcctgtactaaaaagttatatcgtttctattgggaattgacttagaatatagatatctattttcttcattacaggtttttggaaaaaatatgacaaatccaaaaaatttacaaaagacaattcaaagtcattaataaaaatttggaaggatatattactttttatgaaataattgcatattgtcatttacacaaatatctctctttgaaagaccaatgaggagtaacagggaattagaaatggcaaacaaatcaaccccatacaaagaatgtggctgaattttcaccgaagcaaatgaaaacagttctctcattcattccttgatgtctagtcattggccaaacagcctaattcataaatggatctcagagaaggcaaattcaaagtgtctaaaggaaattcattttaataaacataaaaccaaatgtgtattagactgtttaatgtaataaagtccagaatgttatatttgatcatcacgaagctttagttcttaaattttgcatagaaaaagcaagccaatgattcagcaatttcatttgtttgactcattttgaattccacaggaagcaacaaaagcaagtgactacatagtagaaatatattttatttctactaagagcttgcctctcattactagagtataattgttacagatatatgtgtacacttgtaatagtaatttttttatttccattttaatctgttctttttaaaatcagttcttgacataattttaaaaattagagttagaaattacaaactttctctttttacattttttagacagtgtctcactctgttgcctaggctgtagagatggggtttcaccatgttgctcaggctggtcttgaactccctgtgctcaagagatccattcacattaacctcccaaactgctgggattacagatgcaaacgcctggtctccaaactttttttgcaacaagaacatttggagatttaaaaagtaaactgaatcaatttgcagctggaacagtgttatttaaacatcacttgacctactaatggagcagtctaaattagatacttccaagagacaagaggaactgtcaaaactggcatctttggtggaaaccctatgattcgggctttcattcattggctttctcattcactttgggaatgagtttaacaaagaataagaatgaaactgaatcatttctggtaccagttttcgccttttctttaatagtcttgggctattgatggctaagatgaagagacttatgggggaaactctcccgtctaaccgtttgtttatgtaaaaggtcctttgccagccctttctggggaggatctacttatattatatattagtccattctcaaactgctataaaaaatacctgagactgggtaatttataaaggaaagaggtttaattgactcaaagttctgcatggctggggaggcctcaggaaacttacaatcatggtggcaggtgaaggggaagcaaggcaggtcttacatgacagcagaagagaagtgagagcgcaggaaaaactgccactattaaaactatcagatctcatgagaagtctctcattatcacaagaacagaatgggggaaacagcccccatgatccattcccctccccacaggtccctcccctgacaatttgagatgctatttgggtggggacatagagccaaaccatatgacatggtatgattacaagaatgacaggcacactgatggccttttcccagtgaactgcaatgttactggaattatttgctttagatatacctaaagggctgtcctcaagctggcttaaaaattgatatttagaagctaaatattaaggtttactctatagagaagtaaatatcttaccatctagctcaaagcaagaattgacggatcgataaacagaattacatagagttttgtagaaaacgggtaaagaaaatatagtaagggactattcaactattacttaccttcattgaagaatattgttatatttatttcatgtttcattgtattctaaagattatctctaaaaagcttactaaagtaaccaaaaaaatagaaaaaatttgaaagaaaaaagaaagaagaagaaaagaaagaaaaaggagagagagaaagaaagaaagagaagaaagaaagaaagagaaagaaagaaagaaagaaaaagaaaagaaagaaagaaagagagagaggccgggcgtggtggcttacgcctgtaatcccagcactttgggaggctgaggcaggcggatcatgaggtcaggatatcgagaccaccctggctaacacgatgaaaccccgtctctactaaaaaaagaaaaaaaaaaaaaaatgagccggccgtggtggcgggcgcctgtagtcccagctactcaggaggctgaggcaggagaatggtgtgaacccgggaggcggagcttgcagtgagccgagatggtgccactgcactccagcctgggtgacagagtgagacaccctctcaaaaaaaaaaaaaaagaaagagaagaagaggaagaagcagaagcagaagcagaaatggaagaaaggaaggaaaggaaggaaagaaggaaggaaagaaggaaggaaggaaggaaggaaggaaggaaggaaggaaggaagggagggagggagggagggagggagggagggagggaggaaaattaggcacacatggccaaaatgtcatacctgagattctataagaccttctctgttttatacagagggacaactagaattggtatgatttcataaatgaaataaatagatgttggtttatatattgtatattatatattcatcttgaaattgaacatcaaatttaattttaattttattttgaaattatttttaaaataatttttattttttaatttaatcgtattgtggaagatatcattaatgctgcagagaatgtatattagaaagtatattttaaagaatatttgttaagtgaatagaactaccacattgcctgtgtcttaaaagctttataagtcccttccaaattgcctcccatttctgtttgcaaagcaagagaatcccagtgtgttagtcagtgttctccacagaaacagaaccaatagactggagacctaaggaaggattgatgttgcagtcttgagtctgaaggctgagtcttttctcttaaggccttcacctgactgaatgaggcccattgcattatggagggtaatcagctttacccccagtgctactaatttaaatgttaattacatctaaaaaatgctttcacatcaatgtctaggcaccaagtcgacataaaattgacaatcacacccaggaagtatctcaagcatgtaaatttagatgttcatatccaggtgaaaagagatatatggaatatactattatatgttactctatacctcataattatgctttttaaacttggggaggccttagttacatgttcagttggcttaatgaatggcagtcagtatattgaatctatgaataataacaaacccataaatacaatgtttacttttacaacttggcaagaatttgttttgagtatcaaattgggggaaaatccaaaatgcatgccaattttgtagtgcttagccctctaacataataattaactcttataaaagctattgatagcttttattttcttttgctaccaatcatgcaaatgtggaatgtacttgaattgaaaaatattcactttcccttactgctgccaacctgtctctgtatcctatcacaaacttcatccaggatatctgtgtttattttctgtttcctcatcactggttaattcttcaaattattcttatttggattctacctctatcatcattttattggaacaactcattttatgcaatctctaaaaaatgtacaatacctgtgactttgcccgtgtcttaaaaaaaagcaaaactagtttcagttgccaaagatagacatcattcacctatagctcaggctggaggtaaatattagaagtgctgttgtatcagctatccctgaataggtaggattgaagctgtgattatatattaagtcaaccagaaagcgagtatggactgctaaggaagaggagttagaatgaaatgtcaacgctcaatgcctgaagagaacaggggagtaaatagaaaaatcagcggatgcgtggtcttttagaagaaacaagttactttgaaaaaggtagtggtgaacatttttgaaagcggatgaaatgtcaagaaagattaaaccttaaatatatacaatgagaagacatataggggcctagcagagggaggcaacggattaaagtgagttgaagaataatgaaaaatctgctaaaaatatacaattctgaattattttgtactgcataaaatatgactcaactgatgtgacctcattctatatctagcttcattttctattgctaaattgactttcaaaatgtgccccgtaatgaaggtacttatcctcttattttattctctcatttcaccattctattaattcatccaaaaatattcattgagttataactatgtgttactaccatctgggaactgaaaactcagcaacaaacaaatgatgatgaagtctctgccatacatactacatttatttagtcaaattgtagcagtcgggatggtttagccaggtttgctggggaaacaaccatccatgtaatctcagaggcttacaataataaatcaacacttacttcatattcaaactgcatgtaggctgaagtcagctgcaatcctcatccatatatttttattccaggacccatacagaaggcagaaacaaacaggcaaagaaatttcattagtaccttttaaagtttcttctcaaaaacagtatacatcgtgcctacatttattccattgactaaagcacatcacatagtcaggtcaaacatcaatggagcagagaatatatattctgtccataaggggccccttaagcctgatgtcaatgagcaacaatgtataattttcttacaggaaaggaagaatgaataactgcacgataaaacaacctagcacaggtatttactcctgtattttacctacaaagccatcctataaatatctaagaaaatatggctcagctttaaagcatcagcaataatactgctgcactgcttgtgattcttaaaaatggcttgatgttgggcatcaacattaagacttgtattattttatcattttacttaatacgattacttgtttccttccttgggaatgctaggaattattgatatactgtatttttttatttctactaggacattctgcattaggaaaaagttatactttttataaagcatcccaaataaatcaattcattgagtcattagaagatatttacttgagtttctacaatatattccaatcacaactggacacacacacagtataaacaaattgtccaaaatttatttcaaaattcatataaaaccaaaagaaccaaagaaggtatacatgcaaccaacaatcacatgaaaaagaaatctcaacatcactgatcattagagaaatgcaaatcagaactacaatgagataccttttcacaccagtcagatggctattattaaaaagtcaaggcggagcgcggtggctcatgcctataatcctagcatttgggtagaccaaggcgggtggatcacctgaggtcaggaattcgagaccagcctggccaacatggtgaaaccctgtctctactaaaaatacaaaaattagctgggcgtggtggcatgcacctgtaatcccagctacttgggaggctgaggcaggagaattgctgaaacccaggaggcagaggctgcagtgagccaagaccacgccactgcactccagcctgagtgacagagcaacactcggtctcagaaacaaacaaacaaaaaaacagatgctagcaagggtgtggaataaaaaaggaacgtttgcttatacactgttgctggaagtataaattcacacattgtggaagacagtgcagtgattcttgaaagacctaaagacagaactaccgttagactcaacaatcttatgactgggtatatacccaaaggactgtaagttgttctattataaagacacatggatgtgtatgttcattgcagcactattaataataacaaagacatggaatcaacctagatgtccatcaatgatagactggacaaagaaaatgtggtacatatacaccatggaatactataaagccataaagcagaaaaagatcatttccttcgcagggacatggatggagctggaggtcattatccttagcaaactaatgcagaaagagaaaaccagataccacatgttaccttataagtgggagctaaatgatgagaacacatggacccacacaggggagctacacacactgaggggcctacttcaaggtagagggtgggatgagggagaagatcaggaaaaattactaatgggtactaggcttaatatctgggtgatgaaatagttggtaaaacaatccccatgacacaagtttacctatgtaacacacctgcacgtatacccctgaacttaaaataaaagtcaaaaacagggcttcctgtttggtctctttcccacccactacgctctacaatcagtggaacactgggccccaggctccttctaacagagttctcgtcaatcagtcccacgtgggtcaaatctgattatcttccctcacaaccacaacctgctatgttttgtttaatgtcatttctcaacctttaggaaaaatctagcctcattattatggtacacagtgcctgggctcttctttttcttcttgttcatttcctgggcctttcctctgtctcacaacctagagcaactctaggcttctttcccttcctagagcacatgcattttgatgtctcctcattttctgcctagaaggctgccctcacccattcatctttccttaggacttttcctgaccctttaatgtaaacaggatccctataatatttgctcccatcaccctgtatgtttcctttatactgatatcataatatgtagctagacatgtttgcagcattttttaaatgtttgctccgccctctagaccttggatgctcagagcatgatctcctgcactggcattggtggagagctctaaggcaagataaatataagcattcagagtaagcatttcaaaatatctgcagcaatttcacattgccaggccataaaggtttttgatcaatgggattatttctgaccagggtatagtacagttaattgttgtggatcacatatgatctaagctgtatgctagtcatatgtagcagaatcacatagcaacaaatgacactttaaggttagtttgtgcactataacccaagtgtgtgtcaaattttgagaaaatgtaagcctttgtatgcttaaaaaaatttctaggtgcactttactttttaatgatgcctgtttttcaaattataatgtaacattattagttatactaagaaaatacaatttacattatttaagtttaatgccaattaacacggagagaaataagtttctctgggcttgttacgagaaggcatagattctcagctacagacattttaggttaaataatggtgaagaaaaacagtagggaaaagctaaagaccaaaaagagttcatacttgttttacttagaagtacgtatcctagtacattgagatcagttttctaaccataattgatgatactatgctaaaactatggtgcctcatttgtggagttgcattgcatagtgaagggatgaaacaatgaacacctatgtggtatttacataaaagatataaataaaagtgttcaaaaccacattctctgtataagagtatttaattgaaaagcctacagaagcagatgctcaacatttcacatatgaatattgatgctatgtgtcttattgtaaaacagcactttgggttgctaactaaagaaaatgtatacaattgctgagacagtgaagtatggtatcaaagatacttgtttggaaatgcaatgtgaatctgtattacaaagtcaatcaaataccactttgcagtaacactgtatactcaggagctgagtgatgatctagaagaccaactcactgaacaagtaaaactagtaaagtgtttttcattgtgattagactaatgcactgatactgctaacatggcaactcttttagtgtagtccattttcaacattatattgatattatggaacttttttcttcatcgctcatgtaaactgactagatctgaaccctatgatatgaactgtcaactggtgtagtttagagattacgtttcacatgcatgtttctgtggcataatatctattacagaaaacattcttgaatggttacccagatatggtgcttttgttaaaatgcaaatcaacacagttttctttatcaaaaacatcttgcatggcattaaatgtcagctttaaaaagtcactgatggcatggtaaaattttgtgagttaagtaaatgtcaatacattaaattcaagattattttacatatcaagtaataatatggaagctgattacgaactcaaattatttcataaagagccatgcagttcatggagagcaatagttctgtggaaagcacttcaattactgaataaacttttaatgtttcacttcttaagaaaccagtttggtctaccaatttaaagctgttcagtgatagccagggttacttgtttatctgatattttttatgtatttaatgatattaatatttttaggtattgtagaaatagaacaagtttttcaatgacagaaaatgaaactttgagaatttatggaatctagttttacagtttatatatggaatatagtatgtatttaatgatattaatatttttaggcattgtagaaataaaacaagtttttcaatgacagaaaatgaaactttgagaatttatggaatctggttttatggcaagctaataacaattaccagtgaggtaggtgttaatgttgttattgaacacctgcaaaaggttatcaccaaacatttaatcaagggtttggaattttattttttttaccaaaaatgtgtcacacataagaaatgcatggatctgaaaatcattctcattgaaagataattcaaatttaataataaggataaatttatagaactagctactggtggaatcactgaagttgtgttttgaaagcacatcatcacttacttcatttttggatatcagttaaaaacatacatggtgagctagatgaaattactttaaaggctcttgctctgtttctaacaatacagctccacagattgttttgggcacaatgagtgtcactaaaacaggaacctagaaatagtgcagataattatgagtaaatgaacgttgtgaataaaatgtagcctagacatgttaacggaagaaatgaactgtttgcatttattcatatcaaaatctttaaatgtgtttatacaaagtattctcaaagtgtgcatataagttttcattgaatgaaatcacatttcacttatacattttgtttagctgagattgtagaaagacaaatagtatattagcaattctcaatattaatggctatgtgtatactcttaataaaaatatatagtcttttggaaattattttcttcatataccatatttgttctgattatatgtataaaaatggagagatattcctgattctacaaaaaggttttgcagtttatgtatctttgtttaattttagttttctagtaatttattttcatcatatttttccatagtattcattcacaataaattaaaatactggctctttgcaataaatactacttttacctttttagttttgaaataattacagattcattagaagttgggaagatagtacagagaagtcccatgtaacttacatcaagtttcttccaaaggttacatcttacagaactctatacaataaaaaacagaatgttgacattaataccatgtatgtatattttcattttatcactgttagattggtatgacgaccactccaatcaagataacacaaagatcttacagcgcgacctctttagagtctcatccatccccttccacctccaatgtccataaaccctggaaaacaaaaatttgttcttccatgtccatagttttttcatttcaataatgttgtatttttaggcttttgaggaacctctatacagttttccataatagaaattcttcaaaaaaactaaaaatatggcgttcttaaaatgacaaaattataaaaaatggagaacaaattttaccatttgatccagaaatcccatttctgagatttctaaaaaattccgtatatctaaaagacatctgcattccccatgttcatcacagtattgtctataatagacatgggatcaatctatgtccatcaacagatgaattgataaagaaaacatggtatttataaacaatggaatactactcagcctcgatgaagaaaattctgtcatttgcaacaacatagttgaatctggaagacatcatgcaaagtgaaataaaccaagtacagaagagaaaaactgcatgttctcacttatatgcaaaactaaaacaatctaagaagcagataatagaaaagaggttaccagagcctggaggtgaggcagggatgagagtgaaaggaagaatgatgatatgtcagtcaaaagatcaatttgaagttaaataggaggagtaaataatgagtatttaaggtgctagatatataaacttatttgattcaatcatctcacactgtatatgatagatatatacatgactgtgtctcctataattatatataattataattcaaaaataattaaagctattaaaaaagaaacgaatgttgtattaatagaatattgaagtatgtaatatttttagatttttttttactcagaataaatcccttgagatctatttaagtactggaagttagaattctaacatgcattttagtagaacacaattcaactcataacaatacaattatggctgacattggtctgtaattttctttttctttaaggtatttttcaccttttcatgtagtattagcctgatcttatataataatagtccctcttcctctttttttgctgaaaaagtgtgtataaccttgattttatttatttagttttagacagaatttaccagtacaactatctcagcgtggaactttctttatggagacaaatttaattgccttaatggagattaggattactcagattttctttcttattggtaattttgataaattgtattttttaagaaagttgtctatttgttttattttgtcaagtttgttggtatatcattcttaataacattctatactattctttaatgtttgtagtatttaatgcctttgattacactgctatcattaaaaggtattaacccacttttccaaccacgctattataatgaatagaacttcctcgtaagaatttcttcatcattcattctttcagtatattcactaaacatcctgtaaatcccagaaaacagaggccgggacagattagatgtactttctgccttcacagagccaatggtctagtggattatgtggctattaagtaagaatttggaagtgtgtttggtataatgatatgaagaccatatgtttcaagaaaactttaatgagtctaaagggtaaatagaatttagttaaacaaagagaagaagaaagcactgtctggtcaaatagaaagctaaagaaaaatttcagaagcaagaaatgatgaagtataatccaagaagttaaattaaaaaaaaaaaaaaatcagcattgccaggtatagactgcaaaagggggagacagcaataagaaattatactgaataagtatgtgtggccaaaggatacagtgcttgtaagtgttcatgagatgcgatattttcctaaatgggatgggaaagtattaaattctttttagcacatggaagtaattatcagatttgcattttccaaatgttactgaggacttgacgtatagaaagtatcggcaagaaagcagactgtaagcaaggaggtgaattaagactttgttccgatgacctacacaaaagacgatgatggcttgaccaagaggtaacagggcagttttagaaaaggagatggatatgtctaccagaattgactcaatcttatgattgattgaaattgccaagtaagggagacaatgcaatcaagagtgacacatagatttctggcttaggtaattaggtagatggggttgacataaaacgagaaacttacagggggaaatgttctcccagggagagtgttatttttgaacaagatgaatttgaatgggctctaggctacctagtagaaaaattatgtaatataatcaacttacttgaactctgttgagtttgaaataggtagcttcatattgatacctatgctcaatgcttagctttacaggtgctggcaaaaagaaagtgggtatgaactggtttggggttttgccagagttcttggaagagcagaattcagagagatcaaatattctccaagtaattaaagattgggtcatgaaatctaagcttgatgggttgaaaaataaggagaaaagaatagtgggtgtagaaaaagtagagagagccaatgagatataagtttcagggaagtggagaaagagttccagtggaagaagattaacagagtaacttgaaaaaaggaaaattgtagttaaaaattgaatgtatttgtctggaacttctgacgctatcctggatggatgatgaaattttgaatgatgagagaggaaaagacaaatgtgtagaggaagaagagcagacatgagagccttgagtgagactcttagaacttcctacaaatgtctttgtaattggactcatgtgtcatctcctctatgaaactgcaggtcgcttaatgtccaggtctgtaacttactctcccttcaatcaacagacgagcccactagcatgctgtcatgtgtaaaacaaggactccataactaaatcttgtatcaataaatgaatgtggtgatttgtctaaaagtcagattataaaattactcaataacaaccacagagcaagtagttccaaaatgatataattcccagaattttatagaacatcattgattatctcatagccagaaaaattccaaatcttttcatggcttgttatcttcttgaattgcctactaaatcctactgataaggtccttatagagaagtaattctacagtagtgtgattaccaggtattaaagtcttaagaaaaaaaagatttcctgtagcaatagcttcatatacaaaattttagaaataaagcagtagaaagcattagcacaggcctaggacaactctaagcaggaaataaaaccttatattttattttcatttttattttcatagagagtagcagaagggcaccccttcttgagaatcagcttcaaagggtgaacaatactgtctttacttaacagacaggctttttaaaaaacaaccttgagagtatcatgcaaactgactttttaatggttttgggcaacatgtttacattttaaacttgtgggtttgcatttttctttattttcaaagttcaatctgtcagctggttggaatttgtaatttatggctctgcagcaatccaaagttccttatccttaagtgatcccattcccaaggaagtttatgttagagagatttctaaaaaatcttaaaagtaaagacaatattttggaatcattatgtgatgtttctaaatatgttcttctatgttgatatccctgtaatttttgaaagatctttgatactacacaatgaggaaaaaaagaaatcttaatcaatgaaatgtcaagtccttaaaatatctcccgtaatacttcccttctgagtattttatttcagcttcagatgtgtatttttcctcttaagttaatttctctaatccttattgattccctactatatgcttgttacttcacataacattaataattaaaaagagaaataatatcaataacagtctctaacttgaagtgtttatggtcagttgcagtgaaaatcaacatcaaaacaggtaatatgaagtttaggacacattgttgggactaccagccaaaagtctggtgaggttgaagatacaataacatatagaagaatacactgatcatcattcagctgtgttttatttgagtaagctaaactgctttacttttgtccaatgcagaattttttaacgttgtatttatttgcttaaaacaaaagagttactctatacaagttttgtagtccatgatttctttctgaaacctttcaggattaaatcaaaatatggcttcagagttacaacagtaacttaaaagcacagaagccaaatatttaccagaactgtaaaactgtaaaactaaagtgtaaaacacttcagtttaaaactattcacattatttctagcttgaaagtgctagaaatacatcaaaattggcctttattaattgagaagttaatttgacatgttagtgacatttctccaggttaatgtatttattgcaagaaaatgtgggtgctttataggaaaatatttgcttaatttaggtgaactatttttttcttattttatttctaaaattttgtagaaagagaaaatctcatattctgtttctcgttggtttctcattggtataagtgtgccccatggagcattgactcattcacatttcacatagaggatgtgtaatttggcccctctgggtagagagaagcagatacccgtgggtccagcatgaccatgtgaaggtaagtctttccttgtcagccaatgcatcgcatgagggtgccaaacttctgttggtggtagagcagggggagtagtctggacctgggaagtccctgagttatcgttacgtctgtcccttagaaaataggcaagggccaggatcaaagacaggatgaatacataagctggtaggtatgggaggattttatatgatgcgtaactaggtctacaacactatcattttttattgtttttaaaaaaccttgatatccttcttcacacagagttagtggttttgttcttcagctacttgcactgaggctataaacttgttcagactttaccttctgtctcacagtatcagctatattgatgatggtggcaattgctgtaaaatacaaccccctagatgttagtggagagtaaaatttattcttgctccatcaagttcagtgcagatatagtcagccttcagtggtgctcttccccatggtgagccaaagttccaagctcctcttatgtagttatcttctactgttgctaagtatttcagagtcatctggagtcctgaagtcttctacaaatcccttccatttggacatcaaacaagagaagaaggacctttaatgaaataacttacattttttctaccaatatcccatcagccgaaactactctctctccccactcctccaacactctggaatataaaacagatttatgagtaaccaccactctgttaggtgcactttgaatttagttctttcaaagagaaacgggaatgggactgtagccacctcaagaaatgatactggcaaaagacacatttggtattcctattttattgccacaatatgctgaattttgtctatattaaggaaaaggtatgctgtatatctatcaaggtatattgtgcttggagatatgtaatactctttggaagattttaccttcttcactattaagggaattggattttccagtcattgtaaactgatattttgtaacgtttaattccatgccataaaaataatatcagggaaaacaatagctgtaagaaatttatcaaatgcctcatcttagctcattcttcaaaaggcgtattagtctagctggacttccatgaaggtaataaaagtggtaaatatccagctaacattttgtaagctgaaaaaatttttctccgaaagtaaaatacaggtcactgtgtggtaaaagaaaatactcatactagcagagtacttaatatagtagttttatgtggaaaacatgatgtctttactaggtgtagttagtgcttagcacataatgttatgaatacatgtctgctaaacagtgcgattctggctatctataaatatctgcttttgcttgtatgacctgaatattaatggcaaactttcctatagaatgaaaatgattaatgagactcctgactaagctggggacctaattatttaaggccaattttgtaatgttcacttagctctcatgtcaattactatatttccaaaaggagacctaccaattgctaattatatcaatattcatataatccgatgacaaatactcacattttgtggacgattgcatcttccaaaatggcccgtctttcatgctcttgttaatgtgatcttgattttcctcccattgcccatggtaatgtgctgccacccctaaccccaagtgtttcagcagagtagatttttgtgactatttcaaccaatagaataagctaaaatgacgccatgacaattccaaggtctggttgtaaaaatgctaggcatattcactttgttctctgaggatgtttgctgtcagccaccatgctagaaagaagtccaaatcttcctctccaaaaacaccccctctagatgtcagtggagagtaaaatttatccttactccatcaagttcaatgcagacattcagccttcagaggtgctgttcccaatcatgagccaggggtccaggttcctctaaataaacttctaggtaaaaatatttctaaataaactaacatgttttgcccatttttaaattggggttttagaaaagctattactgagtttacaactattattaagatatgaattagacaagaagaggccactttaggagttctaatgcacagctcggtttaggtttcagccaacaacctgcgtcaacaaccacacatgtgaggaaagatgtcttctgaagattccagcctccagccagcaagcctttccaagtataaccctaggtattgtggagaagaggcaagccatgctgaacctcagaatccgtgacagtaatttactagaatccaatattagtaaaatagtattttttgtaaatactagatttgagataatttgttatgtagccatggtaactgaaacattctttattcaaacataactagatcccaactttccattaaactttttcattagtgtttttcctaactttaacagtatttacatacatactttatcttcaattgttccagttgacttgacttccaccaactatatagcacagaaaaattctcctttaaaaattataaacatacattcagtcttcaggttgaccctggttttctttctgaatatttttgacttaactgctgttacatgtttgattatacaatacactagattatgtaagagtaaaattattattgataatttctaaactaatagatttagttcagggtcatagcactaatagtcccagtgcatagcataggacttacacatggtaaatggtcaataaatattgcatgaataaatgcatgcacagacacttttaatctgttttgaaaatttagttagaatactgtaaaaaaaaactatgtaatattcactgttaattctaaatgcagatttgagatttagcttatatgtgcttttatagtcttattcatttgaccatctaaatatttgactatgaaattgaataaatttgtattactgtctcatcctatattataaaaactgtaacttattatttttgtggcttattattcacttattaaaactattctggtcatttcaataatggtgatgatgataacaatagcagctagtgtttcttggacacttacttgtaccagaaattgtcctaagttcttcttgtgctactaaattaatttacatgtattgggatataatttactcatagacaaattaattccttttggttgtacagttctatgcattctgataaatgcatgtagtcaagaaatcatcattacatttaagacatagagcatttccatcatctaaaaaaattcccttatgcaagtttgtggtcaattctttctcccatattcagcccttaacaaacaatggtctcttttctgtccatatagttttgccttttccaaaatgtcatacgagtgaaatcatactatatgcactaccatttgcttctggtttatttcaattagtctaatacatttgtgaatcattaatgttgttgcattgctgttttttattccattgtttagatgtaccataatttgtataaatattttccttattgatggacatttggctttaatttgggtaattaggagcaagactgatataagcatgggtgtatagatatttatacaaacatatgctttcaattctcttttatatccacctaggagtggtattgctgtgttgtatgctgaatagatgtttaactttatgagaaagcatcaaagtattttcaaaagtagctgcatcattttcaaaaatagctgtgtcattttgcattaccactagcattgcatgagatttccaattgatctgcatgctcaccacaacttgatactaccagttttgctttaaagccattctaacagatgtacgctaccacatcgtggtcttaatttgcatttccctaaataaaatgatgtatagaatcatttcatatgttaatgtgcatccacatatttccttgaataaagttttatattttgcccatttttaattttttatcattattcagttgtgaaaattttaaatatatttttagtaacagactttcattttatatatatatatgttttgaaatgttttctaccagactgtgactttttctttgatttttttaacagtgtcattcaaagagcaaatcgttcttttttttttaattttgttgaatgccaatatatttcattttccttttatgattcatgttgctggatgttgagtctaaacttaacccaaggttgtctcttgggttttttttttttggacatctccttggagatgttttataatttctgcatgtggtgcaaggtgtgattcacatttatttttgcatatagacgtacaatttttgccacatcatctgaaaaaccacgttgaattatttcatctacataattctagattttataatcctaaaacatgagattaattaaataacccagaggtacacattgtacaccttgaatatatacaattttttttttttttttttttttgacacagggtctccctctgtcaccaggctggagtgcagtggcaagatctcagcttactgcaacctccgcctcccaggttcaagcaatcctcctgcctcagcctcccaagtagctgggactacaggcatgcaccaccatgcccagctaatttttgtagttttagtcaagacaggttttaccatgttggccaggatgttctcaatctcctgacctcatgacctgcccgcctctgcctctcaaagttcttggattacaggcgtgagccaccacgcccagccaaatatatacaattttttatttgtcaattctaccttgatatagctgaaaaagagaaaaggcaatttatttgctccatcagctgacagttgttggcatgttgtggaatacagtatataagaccaatatactttgtggttgtattctccttcttttatgttaatcatttgtgtaaaatgattccctttatctgaagagattataagcagaatcctgtgtgatggctcaaatatttagtaaactttgtggtagtgtaactggcttaggtcttgaggttaggaacaggaagccaatacctaaaatataatcaaggtgaatcatgtcccttttagagcagaagtccaagggtagcaacttgctaccaaatgcctggttggttatcttaaggtgccatattagagactgacagttgatctcagttgctaagttattgggaattttactagagaagtagccagatcaaccttattgagtgggattctgtgctgtcaggccctgcatggctccatctccactaccgtggctaccctgtgcttgagtctctgctgcagcaaaagggtgtctgagcatagatgcgatgctggctgatatcaacaagctgctgttaaatctgcactgttagtgcctcttctttgtgaatgttctgtggtgggtattaaaatgtcatacatagatctttatactttgttcccattactgtaagttcatctgcgtgtcccagttcttccaatctttttccttcaagctctatcaaaccaatcaaaccattagcttctgtaaatgtgtctgtacatactcctaccatggactttctatttccatgtaaagtggatgacaacttataccaccctaagatctgcctattgggataaatgtataatcaccagtcgttttgcaacatctatgagtgggactattgtataacaataactgattttcagtttgaacccgcttacaaaggtgaggcccttgggaaacaaactcaacctttttcctcctctgtcagatggctgtaaaaaatttcccccataccaaaagagagatgctgggtgcaacaaggaagaatgaaatggtctgggcgacccgctgtgtagattaatctcaccctccaagattctttgtgcctgatcccatatatattgctttcttcttaaaatgcattgttgctaggccttcttgactttggagcttgtgaaaataacatatatacagtgcaagatgggcagttgtggtcacatggtcacttgatgtgctgggttcagctgctcagtctctaccagagcccttttacttgctgggagatgcgttctgaatgcagacacggatgtatgacttaaatacagaatcccaggattctctcttgtggttctgagaccagagcttgtcacaaatgcaaaagaagaaaaataatttttcttcaaccctcataaattcttagttaaaaaggaccactgtaacaaagaacagattaacaagaggaaaacaaacagaagttcattaacatgtatatttcatacagatgtgtgagacacccagggaatgagtaattttcaaaaagttggctttgaatttctatttgcatacctagcatcttaaaaaaaaacagtaaatttttagataagtactaagacacaggaaaaggactttgagactctagaagcagcaacttgtgggaaggcaaataaacagcagataaaagctaattaccacatctcatttctgttggtccgtatctccatgcacagcagagacagtgaaaacccaagcatgcatcttctcagtgagtcagcccaccttccttcgagtgttggtgaagatgacttgcctgggtgatggtcagagtttcatacaagtcacgcagtgtgtccagcttccacttctcttgttccacattgatgcagaattggtggatactctccaggatcaactcttccttcttgaccagaatccaaatggggtccctcatgaacttcttggtcacctcaagcacataagaaagcattgtagctgacagcaaactacctgggtgttgctgttaaactttggaatatgacatagatctggtccttgaatccatggcttaacatttcatcagctttgtccagtacaagcattttgatgtatttgggagacaggtatctccagtgaaccatatcaaacatgcatccaggggtatgcatgatgacatggggagcttccatctgcaatttctgcacctcagtacacacattggtgcccccaatacaggcattacaagaggtactcatgtagtctccaggtgttatgaccaccttctgtatctgctgagccagttctctagtgggtgctaagaccaaggcctgggtggctgttagatctaactcaatctgtggcagaatcgatatgacaagtgtggccatttccccagtcccaggttgggcttgagtgatcacatcataacccttgacacaggtagaatggctcgctgctggatggcagagggtttctcaaaaccataggcatagatgccacggagaagaaactcctacagtttcatgtcatcaaagctgtcaaccatctcattctagttactctcgatgatgcctttgggctccatgccatcagggtcattgtctcaggatggggaatcctgactcacacctacaatcccagcactttgggaggcgtaggcaggtggatcacttgaggtcaggagctcaagaccagcctggccaacatgctgaaaccctgtctctaccaaaaatacaaaaattagctgaacgtggtggtgcatgcgtgtaatctcagctactcaggaggctgaggcaggagaatcgcttgaacatttaaacctgggaggcggaggtagcagtgagccaagatcttaccactgcactccagcctgggtgacagagactctgtctttaaaaaaaaaaaaaaaaaaaaaaatgctaattagcaaaccatgttaatgtagattcttctggtaccatgtacaagccaataaaggtctaaagttgtctttggtgatctttacctttgttctccctggtagaagagtgacattatatgttttgtctttgtgaatctatgtactacttttatgcatgtagaaaagggcagaaatctttcctgcaactacttcttcattgcctttagctcaacaatccttcatattttggaggggcatattctgatctcccacatcactaaagatacttcaaatgcatgagcctataggtattatgggtcaggtggcatggctgctttcatggtaacctgaacctgatatggatccgtttccttctccaggccctatttaaagctgggaaacttgcatgctacttaggaaatgggttggaattattttcttaaatgtggaatatgttgcctccagagaccagagaggcctaccagtcatgcacaggaatcaaaagaacgcatgcaccatgcctcatgaccttgaaattacagtctattcatgttttccaggatccctcaagtttgcatagaagactttttccaggattcctctagattttatagaagacaaattggtggcatggatacattgagaaaaaatatacctacatcatttaagttctttaagagtctttctttaagattaacactaatatctgttgttctccctaagacatattattgctttttactcactctcttggtgaggcaggaatagttgggcagtttcaaaggcttccacttgagtgtcctcactgtgctaggtcttaccttacaggagaagtaacattgaggatcatgccaaaggccaatatgatcatttcaattaaacattcttggacctaaagaaataaccatcaagggggtccatttacccaatgaatctactgtgattcacaaatgggccagtactttatcttttctcctagaatgggagagtgtgatgaaatttcaggtccctagaatcaaggtcaaagtcctctatatcagtgattagcagagatttccttaaaatgggccagacagcaaatatattaggatttgagagacatagagtttttgcatctcaaatattcagctctactgttgtagtgtgacagcagccatagataatgtgtaagcaagtggatatggctgtgctcccagtgcaagggcattagctggccttcacatgggaggagtgtagcatttctgcaggcccagaatgttcagaataatctggggacacacaattttcaaggcattggctctcatatccctatatcaacttgtaaggtcttcgtcctcttgaataaggacactggcatgacttcacggacttgctgattttgagaattcaacctttcttttatttttattttattttattttattttatttattttattttattttattttatatttgagaaagattctcactcgatcacccaggctggagtgcagtggcatgatatcagttcacttcaacccccgcctcccaggttcaagcaattcttgtgcctcagccttccgagtagctgaaatgacaggcacacaccactgcacctggatacaaccttctttttagatctgctatttttataataaaattgtgggcttgatcctcaactatttctgccttgtggctataggaaatgaggatctctttatgtgctgctaaaatgccttctgactctcacacttagctgtaaattaatgaattaatcacattcagcttttgttttcattttctaaaatattgagtgcctagcaaaaatcaatccattttatgagccttatagttattatcttccatgaactctgaaatcatgctgcagtcattcatgtacttccttccatcaatgaaagtttaacaactgcactagtacttcctactgggagctatctgtgctccacctatcagccatctggccaactatacagatgcaaatttctctttatagtctattttttaagtctactcttggcatctaagtttgtcttcctgtgttctagaaatcatatgcaaaaatagagatttgcatttacttggtatatataaaggagtgctctcaagaacaacacctggaaggaagtggaaggagtaggattagtcagagttgaactgtgcgtgatgcttccgcaacagaagccttggccactccatgaggaattctgaaccttgccatgacccttcagatatgtccttttgtacttctgaattgagcagtcaatgagtatctgctttctccagcattaggggaagcaaggtggctttggttggctgaggacaataagctcgcctgctactaggtttcttattctctgtcatgctagtatgaacttttgcacatgaaattggcactggtaaggttctaaaagaatgggcagaattagatgagaccttttcagttcttaacttgaaactgggctagcatcacatctgctgcattctataggacagagcaagtcacaaggccagtacatttctgagaactggatcaagactccaccacacacttgcaggtgtgagaggctgccttatgaaaactcacattcaaagggtatgtgtaccagaaacgaaataattggagacacttttacaattaatccactacgtatagaactaagatttcaactaattattattttttcttcctatatgtttcatagcttgttcaatctctaaattttaggattttgaaataaaactccttactaatagttggggcttcctattttttctcccacttttccaaaccaaaccaaagcattcaaggctgttcaaagaaaaatataatgcatctttgcaagattgaatagttgagccaataatgcaaaactcacttttcattttccttgttaaatgtattttacttgattgccaaccaccaaaataaacactggcacaactgcaggattttcaattttttcaaataggaactggaagtagcagaaatagaatcgagggaatgcaaggtcagcacgtgatgtgtgcttataaagctgctctgactactgtccccactgatttatacttgtcacatactgagggctcagttgtggcgccaactttctttcattattatctttattttaaagtgatttgtgtggtggattaaaaaaatgcattgcaggaagtcaaaaattctaagtaatcttagtgtaattttggaaactaatatgaagaatagagcaagaaaaaaattggtacttgacttctaaatatgggagataagataatctaaacaaaaaatatatctaatgtgcttatgaaataatgcatgtggcaggaatatagatattactactttttccttatacacagatatcattatgtagaatatatccaagatcatcgatggccacaaggctaggctgagtgtggtgattagtatctgtttgtattctctatttatgtcttattcttcagtttacttaataaagctcagaacttttaaattgttgctaatagcagcccaattttttgacattgaaatctctcagctttatagctttataaagctttataggcttatctctgtaaatggcagctgtttcacattcttggaatttcaacttacgaaggtcagtgttaagaacccattcctactatctgaaattattcaatctatgttagaataagagagatctgaaaaaaagttgacaggttaattgtctagatttcaaggtagaaatcagtctacaaaagtcctattgctgacatgatagcttcattattatttgtgtttgtggggtttttattcatttatgtagaaggaaatgatgtttaaggacagtagctgtctccatgtgctctttgttggtgctgggaatttcttatcagtgtgaggttgattgtgaagacatgtttgagggagaaagcacaggaaaacaagctcttgactgccttatctttcagtgagatcatgcctcatagaatatgttgagtcatttcaacatctttaagggttatcatttgagtggtgattctaagcactgacttgaggtcaactggctataggggtaaaaaaagtttcatgtagcaatacatgtaatagtttagataaattattaagtgatgatggacacagagttctacagttctgagtttatgataaaatattctaataggaaaagtcttcccattatccgtgatgttacccaggcccatacctaatgagaataataatatttttcattgtatagaaatttcgttattcaacactattttcatctttcttatctgttttgttacacacaacaacccagtgagatagttaaagggaatttcctcatcttttatagatgaagaaagttcaaaatattctacatacctgacattcttgaattggtaagattctaccacaattagattggcccaaaaaagggcaatgtgttattccatacgaggggagacagaaaataaagaaataaatgcataaataagatacttttaagtagtggtacatattatgataaaaatgaaagagggtaatttaaccaaaaagtaatcattgggcacctccaaactatgtaaataaagctggctgtaagagggatttaagttgaaactgagattttaattgtatcatggaattacccgtgtggagatgacaagagaaatcaagcattgcaaagccaccctgatacactcaataacctggaaaaaggtcaatgtggctgcagtgagcaaagtaaaagtggtataatgtgtaatcagacaggcaggtagggccagatcctgtagagactggtcattgtaagaggtgtatattataagcgaaatggaaagctgttgaaggttctaagcaaggagacatcattatctattttgaatttttggaaaaatcatgctatttggattttggagcaggaagtccagtaaggatctatgcgtaaacaaaacagagacccaggcttgtgctacagcaatgatagtggggagtagtgaacagttagcatatacattgtagtaaaagtgcctgcagatttgcctacagattaaaagtgagaatgaagagaaaaaaggaatgaggattaatgacatctaagcatttggataaataactgggcagatgatgataataacatttatcaaggcagggggaaatgggtgagtaggttacaaggtcaagttgaaatgcttgttacaattaagtcaaagtgccacataggtaggtgatgtacatttctgaagttcaggcaagaggttgttattaatgagggtctcattggtggactgcatttaagacatgggacatgagataaatgagattagccggagaaagagagtacagacagagaaaagacactgggacactgagcccctcagaatttagggttcctactggaatgcttttagagataaaattactactgcttcaattttttcaacttttattaatggctgtaatcctaacaactcatagtacagttatttcatactccatatgtataaaatccaaattattaactttttaatacttgtattagatgcctcgttcttatccttcagttttcatctatatttatttgcttttcatggcaaaggaatttcttcttggccatgaatggcaaggcagaatgaaaaatattggaaattataataagatggtgcttggcaccaaactttcttttactcatgacataattcagtgactacattttttcctgatagagaaaatacccaaaaaccaaatacggcttcaaaatatgtaaaaatattctttctcttatgatccagcaagaaataattgtttgataaaatgaaataacctttatgtgaagcccattaggacaattacagttactaggataaataattttgtaaatatatttcaaatgtttccactgtgtaaagtaattgaaactttttattgcaggtttagaaggttccgttctttaaaaaagagcaggctcacacgcacccagaacaacaacaataccaacaacaccacgtgcacacggcacaaacatttcacaaaaaaaaaacaacaacgaaaaaagaagtaactaagggacagtcgtggtggctcatgcctgtaattccagcacattggggaggcaatgtgggaggattgagtgagcccaggtgttcaagaccagtctgggcaacacagtgagactctgtctctattaaaaataataataatgataaaatgaaaaagaggtaactaagcttttgaccaaaggggcttgagaggtcacatactgcaaatgactgaaattattctcgttaattagtatgtgaaaaccatcagtcagcggattaggttagacctagaaaacgtctttaaatgggaaatgtagcactgtacaaaatccttgtaagactttgctaatttctaaactaagaagccttttgagctgcatgtgggacatatttgggttaaacggattcaattacagttctctttgaagaccaagaggcatataatatggcaaaagagtgaggaagtagaagtcaaaaattatcaaagtaattgcaactgctttaacattagcctgggatctgaattcagaaactttgggacccatataagccccataagtagcatacttaatactaaagtaatatatactgtattttaagttgaagtgattgttttatagctctgtcctatcaaggacgtcttttttcaccttttcttacccacacatctaattcttaagctttccccacgttctgacgaaaaagaactctgtaaattcagctccatacaggctgtgagacagtgtgattttgtaggggggacaatgtggctcggcatttacagcctttggaaaagtctctacactatgccaatgctgctaatggccatgtttcaggtcataatttattgtgcaaaggccagacagaaactcaagggaggtctcttttgcctcaatgttaatttctaacaaatgcaataaacatttcaaattttgaaggaggcaaacaaaattctgtttctttgtatttctcccaccacaaaatttcaaggttgacttgaagtcatacaaggttagtaattttctgagtgtttttttttttcctattttcttaagcatttgctatatagtgaaataacttccaaagaacaggatgttctccacagctaaagaactgctctagctaggcaaatactcatatcgtcaattaccattttaaaatatctcagagaacactctttgaagtaatccttcctcaaatcctatttgaaactggattcgtataatgggtaagtgggtaaacattttgtggaatgaaatgaatgaaggggaaaatgaattttgtcacgtataaagttgttatctttaaaggaatgcctgagtgttacttcttctcaaaattctgggaaaaccagatagagtattgttaaccaagtaattcctaactcatggtttgaaagtctgtgagggtttatgagaattagggttaagtgaagaaaggcactgaaacagttcagtggatacaaaaatgtgctttttagtcaccaaattttacatgtttttatttatccaatctttccatttctctttacctaatattttgcctactcttcttcatcacaaggaccatgtgttacaacaattttgaaatctattaagcaactcgctagtcatttagtgatttgcttttgaatgaaggattaatataattataaatcgaatacaaattactttcagtgttatatacaatgtatttatattaccgataaaaataatccaaatattctcagcctttcaaattggcattaatacaggaatggtattttaaaaatcccacttaatccaaattacttaaaaaacaactctgttttctacagtaattctgctctggaagtagatgatgtaaggatgaatttgtagcacttattgatataaaaataattaaaccagtaaaatataatcatctcattcattatctgcactgcttggcgtatgataaggcactaacaatggattcctagcaaatggattgcagttaaataaatgtagaccatccaaataatcaaatattacagtgcacatcttggatttagatgtaatatattaacaatttgcagcttataaaattcggagatgtgagaagggtttggaggcattgtcccgtttctttgttggatgtactccacacccagcttgcccaacactgaacttagatacccgagatgataagataaggaatgttttaaaaacatgtatcccatctgaccttaaatcttagaaggaaacgtcaggatttcctctttatatattcctttctctatttttcccttccctcatttcttcacgtttgctttccttgctttggaacaatttcaaatataaactaatttttgatgatttttctaggattatttaatttttggtaggagatgtaattgtggttacgaaaaagaacgtactatttttaggctatggatgttaaattttttagagacatagggatatttgtgtgcaatagattttcaaaggttttcaaaagtacatgcaaatatgcacacatagacacacagagcaaatttgttaaagtgttaatagatttcagttctaggtagggagcatgttggtgtttttttctaagtttcttcccactcttttgtatttttgacattttttattataaaaagatggaaaaagacatagaccctatgacaatcaattctatgtcaacttggcagggttctagtagcaatttttaatcaaacaccaatctaggtgttgctatgaagatattttgtagatgtgattaaggtctatcatcagttgactttaagtaaaggagattatcctaggttatctggatgggcctgattcagtcagttaaaaggcttagtaccagaactgaggtttccctgaataataataagtcctgcctgtggaatgaagctttagttcatgctctagaatttcagtctcctttcttgaaggtctgccctacgggctttggacttgcctaatcagcctccacgatcatataagcccactcacggaaataaatcctttaacatatagctcctactggttctggtcccctgattgaaacttgactgatacataccctttcatccaaaagcttcctgtagagttgacaggccatatgagggacacttagcttagattggggacaatgtcagagaaaactgtgtaacttccccacggaggagatacttgattcaagatccgaaaagcatgtcataattgataaaactatgaagaaatttatttatttcgagacagagtctcactctgtcacccaggctggagtgcagtggtgcgatctcggctcactgcaacctctgcctcctaagctcaagcagtcctcccacctcagcttcccaagtagctgggactacaggtgtgcaccactatacccagctaatttttgtatttttttgtagagacaaggtttcaccatgttgcccaggctggtcttgaactcctgagctcaagcaatctgcccaccttgccctcccaaagtgctgggactacagacctcagccactgcgcctggccaggaagttatttttatatatatttaaaactaaattggtccattgacctaagaaagttaggtgtaggtattagatacagggactaaaaatatttgaagagggtcacatgactttattgaatatcattttgcgatggggttttctaacaaacagtcaattaaacagtgtggagtgcattatgggcaagaagttgtcttagcactcttagggaaacagtcaaaacattggatttatatgttttgtgaatgtatttaccattcaattaatgttctatgcagaggatacttaaggtttgcattcctcatgtagatgatagaactacttgtcaaataagattactttttcatgcttttagtacaatttaaattttcctagcatgacagataatccacaaaatccatctactaatttacacataaattatctatagagattgcagatctacaagtagaacataaattgtttaaaatcaatgatacagtcatcggcaagcaactttattccaggatatcccattttactccaaagcagcaagagtgaaatggcaacggggaagtgtacagggtggtggtggagaatggaatgaagaaaaaaaaggcaaggaattttggctgcgccctgaatagtagcatcatcaacctctaaataatcaacaatctggataaatgatttagcatctgacatacttattttgtcaatccaagtcatttgatcttgtcatgccctttgtggcattcaatatatggccttcaatataacgcctctacttcttgtctttaaacaactgctactgtgaatgtaaatttctaaccaaagcctggtgagattgttttaatgacatgaacacaagctgcgtttatgaaggaagcctaaacattcagatgtcttttattttagtcaagaagttaaatgaaaatcgagagaacaatttattggcaaaaggtttgttttgtctaacctatatgcaaaataacccacaattttgtttttattcacccattgttcaatcataggaaactttcatgggaacctaaagcaaaaattgctgaactatatatgtggaaaatcaaccaacatgaatacaaaatgccaaaataaataaaaatggttttgtgaataccctctatcagaagaacagtttctgaagggaaaaacagtgtagaaaagcattaaacaaggagaagtataatttttgctggtatttagcaatctaggttcagttctttagaaggacagatcacagattgattttggaaatctgctcaagcttagaggctggctaaagctttcctgcttttacaattttagatgcttagaaaaggcattttcaagacaacactcggagcctatgagagagaataacacactcaaagtgtttccaaactgaatggatttaataacctatgcttttacagaacaataactttaaaaatgtcccaatctttctcgaaaacaccatgctgcattaactacttgaggggattttcttgaagagcaacgacaacaataaacaacatttttggttcaagaagatcccttttccttatttccttcttaggttttaatataaaagctaaaccataataatctttttcttttttatatattttacagaatccaatgcatatcaacttattaaagcattataatgcacaagtgctcccaagtgttactgtttcctgtcgttttctcctcccaaggttggtcagagaggcacatttaacgtgctgcagatcattactttatctataaagacttctcccatgggtgtgaggcagaagaagtaattgttgaagtcgggaattgtatgtgttccccacccttgtgattaactcaaacgagaagggatgtggcaagagcagagcctggaaaactcaaatttgagatagaaaccatgctcttgtttttctcaactgattatgttcaacagtgccaaataaataattctgcaaattgggaagggtgactaggaaagcagagtgggaaacaacagcaaaaagaaggaaaatctctatttctcaaagactctttttgtaatttaaaatgttattagagtgccataaaataagtatttctgttaatgtttttgcctgatgaatatatgtgtcttctttttttaatgtttaaaattattttacctttctatgaaaatatttaattaaggtgtattatgtatttgtaattaaatccaacaaaacttagatgataattttaatgaattaattacaaagtaagagagtcattagggagtgccttctaagacatttgccagcattcatggccctttcccctggatgctggtagcatcacctctttgattgtgataatcataacatccccagagattggcaagtgtgtcctacagggccacatttctccccctacagcaaactgagctttaaggaaacaaagcaatggcagttaggaaaacaaacaaacaaaaacactaaaaaatgatataactatagagaaataacacaaataaagtcaatcttagaaggtaatagagtgaagaaagacaaaaagaaggatgggtgaagaaatgggtttggggagagtaaatgtataactgaaggactcaatatttcccccaaaaagtaagagcagaacagctatgaaatgtgagagagtggtttgatgctagcagatttttaggagtttgatagaggatatgatttagcttttgcaaaaataacttgccaaggaatattgaggagcagctgaggttgaataataagctgaagtggtgccaatcagcaagctgatgaaatattccccaacaatgttcaacctcaagggaatcaataaatagaaaacaaatggtgagacagatcagcgtttgaggttttaacagggcaggcgtggttctggaattagatggaaagaaagagatcccaggatagaatgtaggtaaaatgattggtgattagatccaggctgggttatcaggaagagaatcagtgataatggaaaaactgggaaaaaaagccagagaattattaagtgtttggaggctttgataaattacaaaaatatgcttcatgtaactaatgaagtgggacaagtaaaactctaaaaaatgtagttattaagagggctgggtgcatgtatattaatccaaggaacagatccctcctattggaaatatacaaacagtctctgtgcattgcatatatactgacttgagtgtttagacactccccttaccaatatctgtttgtatgtgtgtgtgtgtgtgtgtatatatatatatatatatacacatacatatattaaataaatctatcttttatatatttatctgtctaactctaattaatatttgagagttttgttaattttttttaaatcattgacttcttacatcatggtgaaggaaagtaaatgtgtgtatgtaatctatgttaatcaagtaggactaattagagctaacagagagtttatttttgtcttattgtctctttaaacttgtacagaggataaatttttttctctaccactagataaaagtggggggaggatgctataatttctggtcatttttagatggtataaaatacatggtcactttaagtggcaaacacagtctcatgttttcagcaaattaaaatgtccggtcatagatatcataaggtaagagagtcagtagggagcgtcttctaagacatttgccagcattcatgaccctttcccctagatgcccgtagcatcacctccttagttatagtaatcataacatctccacacattggcaagttcctcctaccaggccaaatttctccccctacagcaaactcacctttaaggaaaaaaagcaatggcagtaagaaagaaaaaaaaaagatataactaggccggccgtggtggctcttgcctgtaatcccagcactttgggaggccgaggtgggcggatcatgaggtcaggagatcgataccatcctggctaacacactgaaaccccgtctctactaaaaatacaaaaaaattagctgggcatggtggcccgtgcctgtagtcccagctactctggaggctgaggcaggaaaattgcttggacctgggaggcagaggttgctgtgagctgagatcgcaccactgcactccagactgggcaacatagtgagactccatctcaaaaaaaaaaaaaagatgtaactgtaaagaaacagcacagagaaagtcaatcttagaaggtcagagagtaaatgaagacaaaaagaaggatgggtgaagatatattatttgaatctctatttgagataatttgcctttctattcctctgtcagctaggatcagccttaggagggctgtggctgtcagaaaaattaattggagtgggcttcactattcttgtcactcaatcctaaccctgctgatagatgctacttctaatccctaaggatggtatgaaacgagagaagatgcaaaaggaggcagagagcattcctccttgcctggcactactgcatgcagccttcatatgtcctgtatctagcaggtatttaaagctgtggcttctcttgcaaggtattttgtgagttctttaaaggcaactagttggtttccttagactatagcttccatgatgtaggtgatgactctctgttgccttgccaatgttgatctgctttagctttctccaccaggagccacttactgttgtaatcttgggactataggatgctgcccctctgggtagggatcattttggatgacctcgtggctaatgttccttctgtaggtgtcacatccagtcactgggatgcatgcattttgacctgcctgtcaccagctggaagtgcagttcctttccagctgcagctccctactctgctgccaagaatacgtcttcttcctctggcatgagtcaaccatctgtttcccactggagggaatacatgtcgagctttctgagtgtgcctattcaaacccctctactagaattgggatgaggaagcaatgcctgcgccccaagcctttgtgggaaaggatagtgagagtcccagcacagcagtcctcttcccaaaatcccactttggactctgcaattacccgcatcctctcgacctttaaattggagtaagaagcttctggatgaggaacccaagtactgtgtaatgggttctcatgtattttcattgaacacttaattataagttttcaccctgcttctgagttcacctattttgaattccacatataagtgaggtcatgtggtatttgtctttctgtgcttggcttatttcacttaacataatgtcttgcaggttcatctatgttgccacacacagtaagatttcctgttttttaaaggttgaataatattccattgcatatgtgtaccacattttctttatgcatttatctgttgatgaacacagcttgattccacaccttggcttttgtgaatagtgctgcaataaaggtgggagtgtagatatctcttcaatatgctgatttaatttcctttggatacactgtacacccattagtgggattaccggatcatatagcagttctatttttaatcttttgagaaacctccatactgttgttcataacagcattctcagaaaaaatgtacaagggttcccattcctccactttctcaccaacactaatgtttcatggttttgatagtagcattttaacagctgtaaggtgatatttctttgtggttttaatatgcatttctccgaggattggtgatgttgacttttttttcatatgcttgttggtcatctgtatatcttcttttgagaaatgtctattcagttcttttgccacttttctaattgggttattttaattctcactattgaggcatttgagttccttacattttggatatgaaccctcatcagatgtatggcttacaaatattttctcctattctctgcattgtctctttgctctattgactgtttcctttgctgtccagatgtttttggttgatggaattccatttgtctatttttatttttgttgcctatacctttgagttagtcttgttttttaatatttgccccttctaagatttgtggagaaagaaatgttgaatgttttcagcataaagaaatgctaaatatttgaggtgattaataggctaattaccctgatttgatcattatacactgtatacatgtatagaaatatcactctgtaccataaacatgtgtacaattattatgtgacaactaaaaataaagtaaaatatttttaaaaggtaaattaatgataattatgggtttgactatttgaggactattgaggaagaatgtcagagagccctatgctcttatcacttaatagaagaattttaaaacttagatgctataatagatagtttaaaaatatctaacaacttttaaaaacacagactataatgttttaattaaatttatatactcaaaattctattcctcagaatctatattataggagtaaagtaattgtatgaaaagataaatgttggaagatatttattttagcattgttcattgcggcaaaacaataaataaaataaaatgattgctcactcatttataacaggaatattgaataaatttcagcgcattctgagcatgaagccatttcaaaagcatacattaacacgatagcagttgaattataggcatttccataatatattattggctgataaatacaagtttcagaaaagtataaaaacataatcttgatttggtttaatcataaaaaatatgttttgtattttttgttgttttcttactaaaaatctatttggaaatgttaataaaaatagtattatgcttgtgagggcatttacatagtctaaaatgtattatttcccttgtcaaaacacatttctcagtttgatttcatggtttgggttggatagtaatcagtaatttcatgatgatcatttttagcgtgatgatgtgagattctaatacagagataagccaattttctttgcttgaagtccactttgtccaagatacatcgctaatccagctttattttgactattatttgcatgaacatgatatacctttctccatctgacaatctgcctttcatttgatatgtttaaccgtttatatttaatataattattaaaatgtttggatttaaaactgccattttaatatttattttataattgttccctctgttatttattccagtttttcccctactgtgtcctcttttgtatcatttaaactttacttttcattcagttttaatttattaattgtgtattcatttatttattgtatatttatttatttattttgaggcagagtcttgctctgtggccttggctcactgcaagctccgcctcctgggttcacgccattctcctgcctcagcctccctagtagctgagactacaggcaccggccaccacgcctggctaatttttttgatttttttagtagagacggggtttcaccttgttaccaggatggtctcgatctcctgaccttgtgatccacccgccttggcctcccaaattgctgggattacaggcgtgagccaccggtccggctgtgtatttatttatttatagatggtgtctcactctgtcacccaggatggagtgcagtggtgtgatctcggctcaatgcaacctccgcctccccagcgattctcctgtctcagcctcccgagtagctggaattacaggcgggtgccaccacgcccgtctaatttttatgtttttagtagagacagggtttcgccatgttgaccagactggtctcgaaaaactgacctcaggtgatacacccactttggcctcccagagtgctgggattacaggtgtgagccactgtgccagccttaattgtgtttttaataatgtactttgtctttttgtggttatttttaacatttgtttgaggaattacagtatattacagacagcaaatttatgtaggtgtgcagcaacctcaattcttgcctcctcggaagaaagaatttgactgagggacgtaaggcagaaagagagccctacccaagttttagagcaggagtcaaagtttattaaaaagctttagggaggctgaggcaggagaatggcgtgaacctgggaggcagagcttacaatgagccgagatcattccactgcactccagcctgggagacagagcgagactcagtctcaaaaaaaaaaaaaaaaaaaaaatgttttagagcaggaatgaaaggaagtaaagcaggagacttgagagatcacatgcacagtttgacattttgacttggggttttatattttggcatgcttctggggtcttgccttatttctcccgattcttcccttggggtaagctgtccgcatgtgcagtggcctgctagcccttgggaggggagcataggaagtgtgtttactggagttgtgtacgtgctcacttgaggcattcctccctgaccagtcacatgtccctagaaggtcatataccagttgaactctgccattttgcctcttaatgtgcatgcttgagcctactcacctgacttctgacattgtattgggaagctgctaatcacgtttcaggttttttctatctattgggagacggccgttccctggcgccagctgcagccaattattatttgagagaaccagtgtaaataccacctgcccatcatctaatggttccctgacattcctggtggggacacaggggtgcttctcttgccctgctcatgtctaactcctactataacaaatatacattatacttatatttgtaatgcccaactaaaatcagtatttcaccactgcatgtggaattcagaaagcttaccagcctttgggtctctatcctcctttattttgagttgtcttacgtattacaactacgtagaactaaaatactatcaacaatgttataattttctttccactctcaaacatgttttaaacactccagaggaaaatgatagtctataacatttactcaatagtaccatttatgttgctctactttcattactaacgtttcaaatttccctctggtattctgtctaaaggtctttgaaggctgggcgcggtggctcttgcctgtgatcccagcactttgggaggccgaggtgggtggaccacctgaggtcagaagttcaagaccagcctggccaacatggcgaaaccctgtctctactaaaaatacaaaaaattagctggtcgtggtggcatgcgcctgtaatcccagctactaaggaggctgagggggaagaatcgcttgaacctgggaggtggaggttgcagtgggccgagattgcgccgttgcactccaacctgggcaacaagagcaaaacaccgtctcaacagcaacaacaaaaagtcctttaatgattctctttgtaaagatctgctagcaattaattttcttaatttcattatttaactttcattttttaaagatagtttcactacatagataaagtctgggttgataatctttccttttagaacttaaaaatattgctcccccccagaaagtaggtaactatgtaaagtgatagatacgttaattaagttgattgtggtcatcatttcacaatgtgtatggacatcaaaacattatatatatcttaaatgtaaacaatttttattgtcaattatagctcaataaagctgggaaaatattgttccatttccttctggtcttgacattttctaatgagtaatctgataccattcaaatatctattgtttaggacacaaatcaaaattactcagaatttgaagagccaggaaaatatcaacttgagtgggaaaaggcaatcaacatatgccctttattgtgcaaaactcgggtaacaggtaaacaagattaacagggaccgctaggatcaagaaatggaagatgcctccctacatacatctgagatgaatccacaaagatatcaatgtgagtatgggatggcttcccatatagtgatcaagtagattgtcatatttaaaaaaattaaataattattttatgtttgaaaaggaaagtttatcaattaaatttataagtttccaatctgttagacctatgctttgatcacctttcatcagaacttgccatctaccatctacccaacttagggttgctaattagctaggataattatcacactcatgtccttatatgcaaacctttatttttcttggtcactgaagaagagtctcagtttagatataggttttctgtgtaagaaaatctgttttacagaaatgtaaatacattttctctcttactctaatgcttaaaccaaaatatgagcataataatactatagttatatagtattattagtatatatagtatatagtatatatagttatatagtattattatatagtattatagttatatagtatttattaacaaataaaaatttaattgtaaaactgagtacattaattttgcttctttagtaatacacagaaggggtccttagtgaataagttgtattcccaagatagcacagcaaattaataatagagtcaagtgggaaccctggttttctttttcaagtattagtacaatacagtgtttagagggttccagaagaggaatattccttcagcatattagacacaccttaagatcaaattgataccaaattgattttcagaaatgttctacttgctgcattgtgttaaaaataatcttcaaaagtaacagtggaagatgtacgtattttgggcccacagacttctgagttcaaatcaatcttctgtccattagtagctaacaagtactttatttgaacttgaaaatagtgtaagttaaacttattcttaatgaagaatttagcttggaagctatcgctatgtctgacacattttcagtaaccatttattttctgccttctttggctgaaatgtcatttaataagatgcctttataattttaataatcgtgtagtctaattcaccaattatataatacaattgtttaaaaacctatttaagaacaattaatctaaataattcctattttattatattttaaataaaatttatattctgtttaaaaatttgcatatagctaccaatgataattacatttaacattttttggctattgtatcctaaaattttataagttgatatctcaaacaccaagactgatgacacaaaataactgtaatttccagttattatctctaaaggcgtgtctacattaggcaggatgtggaaatgtttgcttaaaggtgaggagcaggtcttaaaacaataaagctgcaagaggaaaagctaaaatccctgacacagctcttgagaatgggatggtcaggtctgaaagtgggatcggaagcaccaggtgaattcactggcttactcagtgtgtgagaaaatgtgcctcaccagattctcttgctgattcacattttctgtattaacaatatttttttttctgattatgtgaactacacaaatagaaatctggtagctcagatgtgtgaaatgagtgactgctcatcatatttgctgtgatggttgaaatttattttttcattagtctgctcattattaccaaagagaaaagtgcatgctttgctacacacagccaccgtccatcttgagcttatgcaggggagggctcagagaggaagaaagggagaagaaaaacctgaaaacaggctacacagggtctgggaagaatgagggggttcaggttaagccaaggaagcctgactctgttccaggatgtggctacaactacaaaacataaacttgcttgtctgcatgattttttagtcccatccaccttctcatacattctaagagcaggaaggtgtagcaggtaggttatgaaataacctcgcatactctgtcattttttttttttttttttgagacagagtttcactcttgtggcccaggctggagtgcaatggtgcaatctcgactcactgcaacctccgcctcccgtgttcaagcaattctcctgcctcagcctcccgagtagctgggattacaggcatgcgccaccaccccggctaattttgtatctttagtagagacgaggtttctccatgttggtcaggtggtcttgaactcccaacctcaggtgatccgtctgcctcggcctcccaaagtgctgggattacaggcctaggccactgcacctggccatactctgtcatttttaatagagaattagggcctgatattccctgaagttcctatgaaagtaagttacttgctttggttttgtttctttccataggatgtcagggacaatgagaggacaagccctgttctgggtcaacctatcatgtaggacaggatacttttctcccaccttctttgttacaggcaccctgtgtcagtctccacatctagctctatgtgccctctcagtctctgctatggctccttgctctgggagagaccacatacctcaaactcaacatcatctcttacttccatccactccaccacctatctattgcatgtcaatagacacatgggggaggagcatatttcagctcaacttacaagcattcaatttctcagacacagtgcttattctgagggatggataccactctcgacacatgctcttcccagtacatggtagttttatataaaagtatagaaggggcatacttaagagaaaaatcaaaccaaacaaaagagacttaaaagacttgaaaatagcacaagtcttttaaagcctcattgaagcaaataactaccactgaaattttaaaagtccctgggaaaaaaagtctaaccatgcccagggccaaggtctctgtgctccgttggctccatccactcctcacttgtaccctcatgagcaacccctggacacccagctgtggcctgtctaaagggaaatgatctcagcagtgctgggttctgcccctccctgcctcagctggtgatagtgatcttcctttttcttagttcttccacttctagaaaacaacaataaaaaatggatttacattctgatcagtgtctcaaaactaggttcattctcctgccgcttctggctagctatattgttcccaaattagtcagctattctccatttatactaactatggtttatgcatgtataatgaatgcctgttaacattgaatttttttattttaaagaaaataatttttaattgaaattagtctttattttattatattactggcatatgagacttgatatgaagattttttttttttaactgggagtgctttctgcttggtcagcaggagaaacaagaagaatgggtttttagggtcacttaggaagacgtattttctattatcctctttttatgacaatcagagttgttctgatgtttccagtttctatatttcttattttttttttcttctttcagcattttgttacctggaggccaggtgatgagatctgaaatcatcttatctaaatccagcacacagtttatacccactgtacctatcaaattattcaaaggtcccttctgatacattgcaaaaatggatacaacttttccctccttttagcttctttccttgtgtaatgtgactttgaagctcttactattatatcaagaaataaaatctattgtctctggattggtcttgtgactgctttggccaatggaatacaacaacaaagctgttgatatacacattccaactctaggcctcaagagccttgccgaattccacctgctgtcctgggatctccgccttccccatagaaccaagcgtgggctagtcccctggaggatgagatctcacatagtccataatcaaatgggtctccttcctagccagtaatactgcagacaaacgagagttccaggtgagaccaggagaagtccctccctgaacccagtccctatggctgatgcacaaaatcatgaactaaaaaatagtgttgtgttaagccagtaaattttttatgagtttgctatgctgttagatgtttgttttcagccactgtattttgtggtagttatatattataaggtaactcataataatccacacaataaattccatatattttgacattataatcaaggcctctctaggtttatatttccagtctcaatcctggtacttttccctttgaaatacactctcaattcatatacttcacatgttttcttcatgtgatgctgttttctgtgactctgtatttccatattttatatgtattgtgccttcttaccacaataccctcacctatctgttctcgtgaactcatacattttctccagaccttgttctaatattattgatttcataaagatttttccaactcttccaaaagatggaagtccttgactgtctgtttctacaataattctcatgtgtctttcatgtatggcatttatcatgacactgcattttctcctgtctccagcacctagcacagtagtagacatagctgcagtagcttcaaccactagtcacaacaatctgctgtctactctccaaccccacctccacgggaagaacacacctcccccctgtagccagtaccactgtgtcagtttcaacctaggtcttacgaaatgtggtgcttcttctcacccttgtaggtgcttccaatcaccattattgagttctttcagaaaagctcatatcaaataaatcaaagggaaaaagagctgctagagcttatgtgctaaagtgtgagcaagaaattaatatcaagtgtcattgtttcactatatgtagaaacaactaactgaggaaatagctaaactgatatttgagggacaaacaaacttaagagtttgtgtggtatcttaagatattctaaggagaaagaaattgaatcaaaacctgggacattttggttgaaaacaaattagttttcttaaaacatattaaatagtctttatgtcctcaaaggaacagccaacaataaatatatttcacttctttaaatttgaactcattttcatcagtctttgtcagagatttgtctttgagcacatctagcttgactgaaagttatgtgttgttaaattaatttttaccatagtttaaatggacgctaagtactctcaaatgttaaggttatatctctgatggcatacagcccatgacaatatgagagaatgaaatatattttaaaaggcatgacattgcttctccttttatgggatggaattggcatattaaatgaaaatgctgctatcctacagcattttttgttaaacctttttgatgaaaatatttttcttggagaaaggagatagttatgttttagtgaatttcagtatgaggaagcaaattttaaatgtcctactaaaacatccttttatatattaaccccaatttctaaagtaacatatgttcaaggtaaaaacattttgagaatactgaaatgtataagctataaggtgaaatcccatgatttggtaccctagagcaagtacaattcacatattggtatataatctttcaggtttacttttctgtgtgtagaatatcctaggctgggcaccgtggctcacgcctgtaatcccagcactttgggagactgaggtgggtgtgtcacctgaggtcaggaattcgaaaccagcctgacgaacatggtgaaacccagtctctactaaaaatacaaaatcagccgggcatggtggtgcatgcctgtaatcccagctactcaggaggctgaggcaggaaaatagcttgaacccgggcgacagaggttgcagtgagctgagattgcgccactgtactccagcctgggcaacaagagcgaaacctcatttaaaaacaaaaacaaaaacaaaaaaaaaaaaaaaaaaaaaaaaaaaaagaaagaaaagagaagaaaaagaaaaaaaaatccttactcttccataatattagattagggatagacatgctaatacattttgttctcccttataagagtagtgagtatacaattattaccaaaataaagttcaagtataaaatgattgtattagatttctaatggaaaaagtacatagtatgctttgattttaattccaaataaactcaaaaagggaagatgatttgcatttttctacagaaaatatgtgtaatacacataattctgtgatgctgctttatgacctattaatttaaaaatgtaagtgtaaacagttggcttgtttcagaaatacaagtgagattttccgttagctctttcactttatgagttgtggtttaatatgattaccgcactgtaaacatctgagcttacaagacagggatggagttggcacattacgtgaaaatgctgccatcctacagcatttttgttaaaccttttttgatgaaaatatttttcttggagagaggagataggtatgctttagtgagctgcagtaataaggaaaaaactttaagtatctttttatatattaacaacttagaatgttccaagtgaaatgtacattttttcatttatgtctaagtttatatgacagcagaatttcagtacttagatatatattttttctgagccattcaaggaaaatatgaaacttaatttttttcctttggcaagttatctggtccatgccaaagggtttccaactgcagaaccatgacttgttatttgttatgcaagactaaatgtgacttccttgctgcttctaaatttattcagtcaaagtttcttatgatctacatgaaccatacagagaagacaacctacactccttcaggcaattcattcaattcatcaagagagagaaataaggagatttaaataaagactctagtgtaaataataactactatcataaataagttaatagactttaagcaaaagttaacattttacttagagagtgaaagaaaataggccataagatggtctgtggaaggtaaaaataaaccaattttactgacagaactatggaatattgatgtattcattgctctaaatgtgtcagttaattctcaggaagaaagaactaagaaaaactcaggaaaactatttatagctccagatacctatgtactgatggaagaaaaatctgagtaataaatctagtgaacaggaacttgaaaagtgaacacaataaaagtattttgaaggtattaaattattattaggagtcagaatataggtgttactaactcattaaatcttaaaagtctattaggtaggcatactatatagtggcagagtgtttaactcttttgcacaaaatcacaccgttggtaagaggcaaagttgggattcatatccaggccagctggcgtgactctcatctcaaaattttgactctcatctcaaaatttcactttagtacctacttacttattcaagaaggtaactgagatctcaaatgaacactagaatatctgggtagtcctgacccatgaaacataccatcttcacagattcattccattcagtgggttcaaacatccattctatctatttcattttcagaggaaaacatatgccatccatgaaaggtgttagttagagagaggaacacacaggcatgcagcgatttgcaaacagcctgtaatttagagattgaattctaggtttgatatttatccaggcagatgatttttttaatttgaaaaatgcccatccttgccatctaagccacaaagtaagcttataattatgaatgctttcaatttcagaagctgacgaaggaacttaacgagtagaatatgaaaatgaaagcttatcatgtgttcaaaagaagcaaatctaattgaaatgaggggagttagaattatatcttcaaaatatgcatggggatacagcatatgagcatagcagagaaatttttataagataaaatacaaaatttaggagaactttatttttaggagaactttaaaaatatatattttttatcatccacagcaaacgtcatcgtaatgaagagatcccatccttcatggtcacactcacagcaatatttcatctactcctctctccttcatctgttgtctgtcttttccgtgacttttccttcaaccttcctgtttttgaatgcattttgatgttatcatatagcataatagctctatgtctccttcactctatataaagctcttcagcaacgggaaatttgtcatgtttatcattatgctcttaatacttagcacagtatctggagctcaacaaacatttttaaagagattgccttattgtaagtaacaatgggtatgttgatctataatatgttttctagtgatgaaattatttaattgcagctacctagagtattaagagaactcatataattcatttgtgtggaaaatatgcaatgatgataatgatgatatatttaattctcatagtttgaacagtacatctccatcttctgtggcaatagatcatgacgaaagcatagactgagtttttcatggcccaacaggatgcaaaagacagacaatcaaacaagcattgaagccaagcaggatgggaaataaaataagagaatcaaaaaggtcttatttggcataatcattacttcagtagaatttaggaagaactgaggtgggatattattggaaatcaagtattcttatgaggcaattgtaattgatcctgatttaagagttcggatggctaaacaagaagtgtaactaaggaaaaatcaaagaccaaatcccagaagcagagaatgttaaaggataaaatttaaaaaatctagaaaagcctgctgacacatgattttgaataatggaattccaggagttagagattgggacaattggcatagttattttagatatttggaggacaataaagaaagatccagggttcacaaccaaagggaatatttactaaacaggtaagagaccactatgaatgtcgcttttgttataaacaggttttttaaatgacgtgattttagctttggaaacataaacttgtcaatagcattcaggatggattcgaggaaaagcaaatactgaatatgaagaggccagaggtgatagttcttgaaaataattaaaagaacctgaactttggtatgcctgaattttggcacagagaattacaaagaagagagagataattaagaatatttggggagtaaccaaaagtacattttataaggccataaaagcatttaccccagatgatgctataattagagatagcatacaatgaacctatgttgtacttaacaaggtgtgataattagaaaagagagaggcaaaattaaccatactctcaaggaaaagctttataaaacaatgaatatttagctgtcttgaaggaaacacaaaacatagataggtaaagagaatatgtggaagaatttccacataaggagtcaaagcatgggccagtgttctagaatcaatagttactcattctgattttaagctggcacggtaggatccagactgattgaaactacattaatacagagtagttgtagggggaaaaagttgggatagataaatgtttcagacattattaatctggaaactacatagatatacttaaatgtaaaatgaacagcataagggaggtttgtaagctctgaaacaaacaagcaaattaaaaaaagacattagaaatcattcttataagagtatcagtgaagaattggacttaggtttcatggcagattaaggttccattaggaggcaattagaagacaatggtattgattcgctaaagatgaaaagacaaatgcaagaaaaatactgtcttggtgtcttttgacagagataggagcaggattacccgaagatagccaagttagctgggggtggtaagcaagcatgcaagcagataaagcactttggaagagcaactaggtgagtgcgcacatattccatttgtgatggtgaaagaatatcctatttgtgtaaagatcttttaagcagatagaaatgaaaactgaaaccttagtaagtatttgaggctagagagttaggttagataagatagtccaacttacttgagtgggtgattttcataaaaaggagggagtggacaaagactaaaagatcaagaatggatacttggaaggccattactactataggtcaggaagaagaaaaaccaaccaagaaattaagtgatgatgataatgatgatgatgtcataatagtaatatatgccagtttttgagcaattattctgagccagtgactacgataagatctttacattaaatgctcataacaccatctttaaataaagaagtagaattgatagaattcagtaaaatgccaaggcaatgtctcagttatcaagagagggcagatttttaggatgatcatcatcagatcttactaagacatcaaatggattaaaaagttcctacggtctggctaaggtaggtacaacaaactggaaagcctgttaaggaagaataatgacattagaaaaggcaggttaagggcctctctgctgttcagttaaggataagagccaaaaatggcccaaaaattcatgtggaagaatgatgattttatgctaacgttggcatggtactactaagagtgtttaaaggataaaggattacaaatgattcccagcaggctgaactcttacacaagtaattctattcataaatgttctttactggttctcatagaatcgaaaaattaataatatagatttttccaaaaaataaatagtagtaagaataatacttatctattattcattataacaaccaaagggttatattagccttgatactaacaacctttcaagttagatcttattacgtgatttcatagttaataaaattgagatctggaccgtttaagtaatttgcccaactcacctagctgtacgtaccagaaacaggcttccagaccagatatacaaagtcccatagcactcctcattcccactgttccacactgcctcctgcaaaagttcgtatttacttctctgctcgttaagatagagataaaagataaataatttaaaccaacaaaggcactgtatataattcccttttaacagctttttcattaacttgaggtattggggaactgggctcaaattagttgacaatttaatggtcttaatccctcaaaggtttactcaatttataaagttggcagaaacacgattaataccatttgccttatgaaaactatggttccacagtaaataaacaaagaatgtcacaaatgtgagttgtgctctggaataataggaagatagtttaagatgtgaagaatgagaggtcaccattatagtaaactatctgctgacagatgattgtttttatgttttttgtaatttccacaaaatttccacctgaggtcatttttaatttataccacacattatctctcttgatccacctttttcttaaggtacactatgctaaggttttgtttttattatcccacccacatgcagttggcctacacaaacacacacacgcccggcctgggttttctcccaacacaaatacccgtggtattcatactatgggaaaaagagtagcttggttaaaagttgatgtagaagtttattaatgtccaaacccaaacttattacatattgtacaggcaaatgctacaaaatgatgaagttatggaagtagagtactcagaagcttagaggccaaatatatatatttttattttgtccaaaaagaatataaatatcattgcccctaaacatgtgcataataggaaacaaggaagggcgtgacatcatttgaagaaagtcaagaatcacctacactcttccttaagtgtttttctaatggtgtgttttttcacctgaaaatactacctataattctattaatatgattttttttctctcatacatacacacacagaacacaatcatattaatgaaaaagaatgttacctgtgagtgaagggtattcagtcaggaatgccaccagttttaccttaaaaaacaaagacatatatacagaatggtcaagtatgaaacttagctgtacagaacccagacaagaagaaaggtgggtttcacacttagggaactgctggtacattcagaaccaaagagagcctgcgagggggagccctgggaaataggcgagctgagaggtagggaaaatcatgcatgtgccaatggatgtgaaagatatttaaacggataaagaatgacagctacaaagtggcccattgactcacaggcacgtttacaggtgccgagcaacgtatcagctcttcttcccattttggggacgctggttgtgttgtcatgcatgtttttgctcagcaacacctcccgcacctctgcttaccagtacatgacattaaaatacatgcactttcacttctgaattccttgtcccccagctgcaagaatttcattttgagtgtatgtggattttaagtcattctggttgaggatgatcacaaaaagatgaaactaggagatggggagggaaaaggaagacaaaacagcaggaaaaaacgctttgccaaagcagccacaggagagataaaagaagcccagcactcacaatcttgtctgaggaaggcagctcagacatatgtgaaagggactgatagtgccagaccatagttctctgctggcacgcagtaccttagaacagaaagttaagccctgggtccttgtgaacagcagaagagggctgacaaacacctggtccccagtggcagactgaacgcgttaaaaatggttacatgcaacttttttccatctgaagtattcaaattgcacagtctctctcatagaattaaaaatcaaagtcatcatcagaaagatattaagtgtttggatggaagatcagaccctgaggaaaagaaagtgcttcttagagtcttacacgcaaactgtctgccacagagcgcaatttataagtatctcatttcaaccacggaaggaaagaacgaagggtaaaatggagatacataaaataatatttatactctctggatctaatatgtcatctttataattttattttcatgagtaataaaaatcttaaaaacaaacttttattaacgaggttaacctgaaaattgtctcttcatcatctttcgtcccataaggtaaggatcacacgttggggcgccttcctgccacagccaggaaacctcagtaaatgacagctcttagttataaggtgttagagtgatgaggattgtgctaagtttgagagcacatgcccggttttttaaaattcaattttcttaaaccacttggtaaaccaaagaaataggtctgtgagccacaagcttttctcagtctgccagttttaacctctcaatgtcttaagttcctcagcagcaaactgtcctgccacaggggcttttaagttaaaaaaaaaaaaaaaaaaaaaaaagaaaagaaaagagaaaagcactaaaatggaaatacaaacaaagcaaaaccttcaacttaagaaaatatgtgttttcctagacttgtggctttcaaacttcaatttctgctgttatttctttttttgaacactttgtgctgagttgtttttttttctttgtatttggtatgtgttgatacttcgacaggaagcttataaggatgatatccacttttgtgtggttttatcagaatgaatactgggggaatagaggtattctacttgtagattaaaaacacaacatgtacatacgtgaatatataaaacatacgcaaacccacaaacatatacacacatgcagtcacagatatacaaacgtacatgtatacacataaatacatacacacacacatacatgtacacacacagagattcagaaacacatttgagaagtctgccaggccttctgaaatgtataaagactcctgtgggagaatattttgggctctctggcaagggtagagcagagtttgtttttagtatggatcagagtctgcccagaaattactccatattgctggccctggtaacccttaccaacttccctgcacctcattttgaccttgcctgtaactgaaaaacaaaagctgctgcttttgttactcttctttaaactgaaatttaagggaaacatggccccgtttcttcctgatcattacgtctcacactttcattcttgttcctctgtcctgggtagcaagtatttttttaagtagaaacttccttcaaatgattggatatgcagatgacttttccgatcctcagctgaggtggcctaaacatagatgtgttcatttgtcctgtgttattttattacttctgcaaattatataagttgggcaacatctccaaaatacttaagtataacaaaactagagctaaggtttagacttagcatttcagtaattttttttaattgaatgaagacactgattttgttttattttcttctacttttattatgttttaaacttttactttaggttcaggggtatgtgtgcaggtttgttatattggtaaattcatgtcacaggtgtttcttgcatagattattttgtcacctcagtactaaaccgagtacctactagttactttttctgctcctctccctcctcccaatctccaccatcaggtagggcccggtgtctgttgttcccctttgtaagacactgattttaatggctatcaaaccattaagactgttgatattagaaaattttgtgaggttattgaaaataattatataagttgggcaacaacttattgactttgttctgtaccatataggcaagaagaattctacaagtgaaattgtggttacaacttttaaactatcttagattaattcttgtggtatgcagaatcctaagatggcctccaaaaattctgccccctgtgtatataccttttctatccccttccttaattacagaggaaagctacacatatgatagctgtcactgccatgattgttatataacaaaagagaagcagatttgcacatacaattatggttccaaatcagttggactgaagtaatcaaggggagaatatttagcaggcctaatgagacaaaccctttcaaagtggatctggatgtcagagactgtctctcctgctggttttggagtagcaggccaccaagagttaggtaatcacacagaagttaaatttgccaatgactttatggccttctaaaccttagatgagacaccagccccagccgacaccttaatttcagctttgtgagaccctaagcagaagactcaattaggccattcccaggttcctaatccacggaaatagttagacaatctatgtatgttcttttaaactgccaaattcaagataatttgttatacagcaaatggaaactaatacaactctcctactgagtttgcaaatacagcaaagcataaccatttaacagttaaataatactaaagtaaatcattctaaaattaatgatttatacttcttgtattaataattttaataatcaatattaattggttattaaatattattacatatataataagtaatatcagttcaattcttgccgtatacctagtaagacatgtcaaaacattctttttcagtgtgacagattgattgctaaagttttcccatttttctactctcttggtatccatgccccaggcaatttaactttgtgtctttcatcaagaggtagaatctatttgctgtactggcgatgtgacttgctttggcccatagaatatgttggaaacgatggtgtgccagtttcaagcctaggtcttagggaagcctgcatgtctctggtctcttgggattctaccaagacctaagaaaaaccttaggctagcttgctgtagtatgagacatgtggacaaatcctaatggttccaactatcccagacagtctgtgtttagctaactcttcgcctgatcacagatgcttgagcaatctcagttgggagcagctaagcctcactagctcagcagacctattcagtgaacccataggtaagtaagaaacaaaaaaatgttagttgttttaagctattatgttttggtgcagtttgttgctcaacaatatattggttatagctaatacatacaataaataatgtttataataaaagcaaataccatgattgaattttattttgaatctttttcatttttacaaaagataaaataataattatacagtatttcctgatacattataattactgtataatatgtataactttatcatatttactgtgaaataataaattcaaaatatcaatttcaatatatgttttacacactcattttgtagatgctttatgtgatttataaatgcaaatataaaacttctgtcctcactaactgctagccacagagtcaatgacagggatattaaaagttataaaggcttatcaacaatatgatgcttggatgtgcgtcattatagtgtacttccgtatttttcaagttgttcagccagagcgtggagatcttcagtaagaaaactcattgttctttgaagacaacttattttatccttggattgctctgtgcattaaaaatgtttttcgttatttgggccaaacattgttgtcctctaatttgtatgcactgatcctagttctatctgctagggggcttagggctcacgtagggcagatttaattcctgttgcacccaggttatggtactttgttatggcagccattaggaaactcatacaccaactaaccccataataccactaattttgactaaatattctaatgtagcaaatactttgttacccagagccatgccttctataggcactcgactacaggtatctacaaatgatattttggataaatgtttgccactgcatgccgtgaactactagtccccctttaccaatggaaacaaggtcattatgcctttaatatgctcaaaacagagaatcatagccagaatattcagaactaattaaggagagaacttatccttaagattctatttctctaggaccactctggtacacaattctgtttaaatcaagtaagagaaaggaagagagagggagaaatgtgtgtgtgtatatattacatatatatacacacgtacatatatatgcatatacatacacacacacatacatacttatacataaatatataatagattctttcaaatatatacatatataatgttattaccagaatttggtcttgcacctttggggaagtgggttacgcagcctctataaagctgtcatcttgcaactgatactggagttgaagtctacagagccgaaagtgaggaagggaacatgcacgtaagttggtgaagtcaagcgcaagctagaactcacaagcactaattagaacctcatgaggacagactgaaattcacattagttgtttctgcctctgactctagtgacaagtatattctgaagaagctgggcctttttgttgtggagataaagacaaagacacacacacacacacacacacacacacgtctggcctaaaagtcaaagaagtgaaggaagacctaggggaagatagaagctgcagacagccatggcttcaagtcagtgagatgagttagcagatcagcaaaagtctctatgagctgcgacatgtcttctccttttcttccttactccaaataaccctacaatcttcatttgtcctgaaatttctatttaattccacactaagtagaaacacacacgaaaggaaattctggaatatgcagttcaagttcagtctagccaagttaacacattacaaagtcatcacaagcatcaggctttttatgacctagcctggggtgtcacagtataaacttagggtgtttgactgacctagtctattgtcaattccacctgtctgttcttcacagtcccaccgggaataaaaaacctcacatttcataaggataattgtcaaataatttgtggtcatattttaagaggtacacagtagatgtgtgtgtatgtgtgtttgtgtgtgcatgtgtatgtgagagagggaaatcgactggcatagaaaatatggtaaaatgttgaaaattggggaatctgggtgcaggaagtaagaaatattatttttactgcttttgcagctttttcatcattttaaattcttgaaaagaacaacatgagagaatggaggtagcaacctaaggagaagtagatgtttactcacatgtataaagttcattatttttcattatcatgttttaacaaattatttgaagagttaatgagaaaaaaacgaagcatgtctctactctttttgtgtcagatagcttccccacctaaatgtcactggcttgacagtgcaaaagagagttgtacggaacacgcatttaatttgaaccagtagattagcttagacgtttaaattatctagttactataataatttactatttttcttctaaacagaaaaatatcaactttatatagccatattttctaaacttgagggtacatgaaaggaatttctgctaaccagatgttttcttctttgcatgtaaagtgggtcagttaaaattttgttatccagcatttcatgttttccaaataggcttgtttcagtgatttgatgaaaatttgctaatttgccaagatacatctttttctgagtgccaaaagttttaatctttttctgattgattcttgctgtcactccttcagtttcagcatgaatgtcagggccccctgaactgcttgcagtcctgctccactttctcagatagtttagaattacagcttcagtctaggattgaatgtggtcatttcaatcattttccgttccccgaagagactataattctcttataaaatgcttattagggaagacattgggaattcagaacaattttattttctgcttatcttccaagggccatgagatcaggatccagatgttctgactcagccaaaggcaggactgttccctggcaaaggaaaagtgagattatgcatgcaggaagcaaagaggactgggaatgcatatgcctaagtgatagatataccagcatagccacttctaatatatttactgagacagagaacataaaggcttgttagaagactgaagtgtcctttgactgtaaccattgtaaatgcagttgaaaaataaaagattacataacaaattgaaacaagtataacagggttattgagaaaataggttatcttgtttcatacagttgggaaggttcaagttagagtagtagcagggaaagattttaaaagcatcattacacttgctattaaacaggaatcatccttgctctcccttctttgctcatttttatactccccaagcatcctcttcctgtttctactattttttttttctgtcttccaaccaaataaaatgctatctgaaaacagccgttttaaatctatttttacttctttttctttgtttctccacagttgcatttgcttacactgagaacatattccaagaagcaaaataaattcagtttgtgttttaatttttgaacaacaaatacaaactactattaaagcatttgtcatcttttctagttaagttccttcatgtctccttctttgcccattccagctctctatatacacggttcatcacatcattcaggcttatacccaaatgccatttcagaaagcataacctgtgctacatgttacctgaagcacgcttcaatttcaactaacatgcttcactgaaatttcaaaataatgctaaatatgatgtcattttaatggcttataagaaaaagacttttgcacatgcatatgcaaaagtccataaagcaatatctacgagaagtttccatctttaaatgagacagagtgaaaaacaaaacaagcaacttttgtcagtaaccctcagcttacttggagacttgccaattactataagaatgctgagttttgtattcctaattagtgtggagcgtattgtgccttgctgtcaatttccacacaacgaatggcttactgattctgacgcttccttcagctgagggattactactcatgaagctgacaaagctgtgaaagatggtgttaggcaagtaaagctcagcgggcttttatgttgaaaattttcttggaagaatgctaacttctatcaaaaagtccatgccaggcaggatagctctagtgattatatacatatacatatatatatacacacacacatttatgtacacatacgcacacacatatatgtatatatatatgtgcattttatgtacatatatttgctatataatacaggtgatatatataacacattatatattatataaaatatgtatatataaataatatatattatacataatattatacatctcacctatattatatagcaaatatatgtgatatatatatctgatatatatgtatgtgatatatacatgcatatgatatatatgtatatcttgtatacatatgtacatttaatatataatacagttaatatatactttatatataataccagtgaaatagtcagtatattgtatactctatatgtaataccagtgatattattaaccagtcctggacgcagttaaatagagtaggcttgcaaacaatttgcatgtcagactgaaattaaacttaaacctctgccccttaacaagccatactatttcaaactttaaaaagactgtaaggatcatctagtctacttgtcatcagctagggaactcatctcttttatgatgttttcagtaggtacccaacccatttctgcttgttgcagtctttgcactgtacgcttaggagtcagatacacttggctttacatgttcactgcaattcttagctctgagatctggggaaaccttctgggtctgttttcctcatttaaatgagggtaatattaggcatttcatgtggttctggggattctgcaaggtaatatatttaacattcccattatagagaccagaacaatatttgtttaataaatacgtttctttatccattccttccagttctgggaaggtcattaacttcccaatcagtttgttccactgttgagctggaagagttgttagaaagttctttcttgtactataatctgcctttctgttattctcatctgtacttttcagttgtggctttgagcttcccagaagtagtttctgtctattcccataagttagtaggtattgtttgaagatggtagaatcaccctatttttatccagagtatatattctcagttacttttactaattttcaattgatatggtttctgtacagtttaactgtacagtctgttaaagcaaactaaatatcacctgagaaggactctgtacttctatatttgagtcgttgtggatgaaccataacctagtttaagagtcagagaagattaaaaacctaccttaggaatatgtgcctgtaacaatagctaagtcctggctaatcccagccaccatacttcaattattcacacattgctgagtgtttattctgtgttcagataaggcaaatgcctagctgtaaccagtccaggcattctgtaactcacttctaatttctgtacataatttttctatttttgtctataaatcttcttccaccacatgactgtggctgtgctggagtctctgtgaatctgctgcgatttgggggctgcttaatttgtgaatcattcattgctcacttaaactcccttaaatttaatttgtctgaagtttttcttttatcaagtcctatcgtactggacaaaattaagtagctgaatgacccaatctcttcttcctcaaactatccatattcatcactcggaatttctgaacactatatttaaattcattatgatttaactattttttaaattacattcaatttctaatcacataaaacctagcgattttcatgggagaacccactggaattgtattttacgacttccttgtcattgtcacacaaacccaagcatgagtcctaaatctagctctatattagtcagggttctctagagggacaggactaataagatagatgtatatatgaaggagagtttactaaggagtattgacttacacgatcacaaggtgaactctcacaataggccatctgcaagctgatgagaaggaagccagcctgtgtcccaaaacctcaaaagtagggaagctggtagtgcagccttcagtctgtggtcaaagggccaagagccctgggcaaaccactggtgtaagcccaagagtccaaaagctgaagaacttggtgtccagtgtttgaggagaggaaacatccagcacaggagaaagatgaaggctggaagacttagccagtctagtccttccaccttcctctgtctgctttatcctagccacgctggcagctgattagatggtgcccacccagactgagggtttgtctgcctctcccagtccactgactcaaatgttaatctcctttggcaacaccgtcacagacacacctggaacaatactttgcatccttcaatccaatcaaattgacactcagtaataaccatcacaagtccactcgttgtcgacttgaacccatatacacctcctgaaatcaaacataatcttcaaataaagacaataatacggtcataattatgcctaacataatacagctatcctttgtacaaccaaaacgcatcgatctccaacctagatgctatgacataaagttaacaacacttaaattctcatatgaagtcaataaatcttatgtcacacgacaaagaaaaaagaaaggaaataaaacgaagatatgttagtacaagtgtatacatgcacaaacatgttcttaacaaaataagaaggaaatactcattacaattatagtcttcttttctacaattggtcatgtggtcatagctggtattgatgactaccttcttctactactcattctatattctgtttgccttcagcaagcacctcagcagtcatggatttttacctggtgaagtgaccccaaaccttcatttctaaagagtctgggccatttgtagtccttcccagactgggctgttgtagtttcccattgaccttaatcacacggcttggtaatactaagagatgccctaagggctcgtgtattccacccatactcttccttatctccattgtggagtagtagacttgcacagcagcctggacctgttgcagagccttctcctgttctggaccccactcaaagctggcagccttttgggtcactcgataaatgggccagagtaatacacccaaatgaggaatgtgttgcctccaaaatccaagtaggcccactgggcattgtgcctgtttcttggttgtaggaggggccaaaggtagcaagttatccttcaccttagaaggcatatctcaacaggccccacaccactggacccctagaaattttactgaggtagaaggtccctgaattttagtcagatttatttcccatcccctggcattcaaatgtctcacccataagtacagtgtgttttgctacttatcattcactggatccaatcagcataacgtcatcaatgcaatggaccagtgtgatatcttgtggaagggaaaagcaatcaagatctctgcaaacaagattatggcacaaagctggagggttgatatacccctgaagtaggacagtgacagtttattgctggctttgccagctgaaggcaaattacttccggtgggccttctgggcaggaatggagaaaaaggcatttgccaaatcaatggctacataccaggtaccagaagatgtgttaatttgctcaagcaatgaaaccacatctggtacagcagctgcaactggagtcgcatttggttaaacttatgataatccactgtcattctccaagatccatttgtcttctgcacaggccaaatagaagatttgaacagggagtggaatcacctctcccgagtctttcaagtccttgagggtggcactaatctctggcttccctccagggatgtgatattgtttttgattcactcttttttctttgtcatgtgacgtaagatttattgacttcatatggctgctgttggtttcccatgtaattaaaatgccctctgggtcaatagaatcaaatatttaaaccaattaatgaaataaataattatacacatctatcactgtatacagtaaaataaatattatttgcattgttctttagtcagtgaacaacgacctcctcttttcttgagttgatatgaaagttgcaaggtcgacagttaactcattaaagaaaaaaaatcatagagattaagataagggataattatatagttttatgtgtatttacctgaaatgttgttaaatattaactactcttctacgcttttttttttttttttgagacggagtcttattctccctcccagtctggagtgcagtggcgccatcttggctcactgcaagctccacctcccgggttcatgccattctcctacctcagcctcccaagtagctgggactacaggcacctaccaccatgcctggctaattttttgtatttttagtagagagggggtttcaccgtgttagccaggatggtctcgatctcttgacctcgtgatccgcccacctcagcctcccaaagtgctgagattacaggtgtgagccagcatgcccggcactcttctactcttacattaagtctacctaggtctgcagaaggtatcagttacgatgcatttttagttatgataataagtataatattaaaggtggagtttacatttaaactcaatacatatgctaaattataaactaatggtaattgtttgaaaattgaaacatttaatctctaatacatttatgtaattaagtatgaataataactatggagtggagagtggtatgtatctcttaaaatagaattttaataatgatagcattgctggaagtccaatttcttcttaaaaattaggcttgttctaagcaagatttgtcattctttataaatagtatacaggagctcaagtgtaatacttcttaaactttgaaatgaagattaatatatgtttgataaaaaaaaactttgactgctttaaactttttcaaattaaaatatcctagatgatttatactcctggaaactgaaagctagacagacaatcaaagatatatttgtctacctgatctaaaaatagccaacaccttttaaaatataacagaagctattgtcaacaagacctaattgcctcattcgtttccttattgacttgattccctgatgttgtgttactcactagaaagtttagtgctattctattctctgttccaatttcatctgaaagggaagcatattggacaaatgtatgccttttttttttttaattttttgagatggagtctcgctctgccacccaggctagagtgcagtggcgcaatctcagctcactacaacccccgccttccagggttcaagcaattctcctgcctcagcctcctgagtagctgggattacaggccatgcgccaccactcccagctactttttgtatttttagtagagacaaggtttcaccatgttggtcaggctggtcttgaactctttacctcgtgatccacccgccttgtcctcccgaagtgctgggattacaaacgtgagccactgtgtccggccacccattctgtttaattggccttcttatggctaaagtgttcatcctcctagattggatgctgttaattccacagagtccatttgagataatgtgatcctgacactgacattaaaattttgcatgccattagtcacagtgattgttctggaggacatggtatccgatacaatgcaatgagactcaattgcgagtttttagagaacaactgggaaaagagagttgtcctttctgctaagggatgctgtaaatataaggtatatttctgggtcattttgcaaggacattatcaccagaacttggaagcctgtaggaaaagagagaaaacagaaagggtatccaatgtagagtcaagacatagataaaattgaagcttgaaagttttggttgactctccctcggtaccagctatctggataaattctacattttgctttttgtttttgtttcttttcttaaggtggtttgagttgaattttctattacatgtgacaataaaaggctcaacatacatgtaactcaacttagaaaacttggaatgacttgtcccagtgatacttgctggaaaatatggcaatattgttccaagtccaatttatgccaaagcctgggacctctaaatatgaccacagttcacagtcatgcagtgacagttctctctactatgtatttatttacattatggactggtccttacacagtcttttcttttaagtgtcaacttattgtactgctacctatttctctcaagttctcttaacatttgttttgtatatttaagtgctccatgaatgggtgcacatatatttacaattgttatatgctcttgagatgagctgacccctttatcattatataatgactttctttgtctcttgtgacagtttccactaaaagtctattttgtttcaaataagcatagcaattagtgctcccttttagttagcatgtgaatggaatatttttcctttccttcgctttcagcttatgtacacccttaaagatacagtgagtctcttgtatggtacatatagttagatactgtcttttcattcattttagtcactcggtatcttctggttagaaaatataatccatttacatttaaatcagttatttatttcacttactattgccactttttaaattgttttctgattgctttttagtttcttttcttctttcctcctctcttgctctccttgtaatttgaattttttttgttgttgtttgcagtggtatgctttgattcttctctctttatctttcgcgtacctactacacataattttttctttgtggttaccttgttgcttatgtaaaactttttttagttataacagtttactttaagccaataataactttggctacatctaaaaactctatatttaccttctctcaccacattttttgttattaatatcacaatttacatcttttttatactatgtatccattaacaaattagcataaagttattttaatacttttgtcttttaacttttctactacagttaaaagtgatttttacaccatccttgacacactagaatattttgaattggactatattcttatcttcacagtgggctttgtatttttacatattctcaagttgttggctaacatccttttattttaattcgagtaactgcttttgtcatttattgtcaggtagttgtggttgtaatgaaatccctcagattttgttttgctgagaagatcttttatctctccattcctaaaggtcatatttgcagagtatggtggacggattggcagattttctttttctttcagtactttgaatagataatctcactctctcctggtttccaaagtttctgctggaaaatttgcttatagtccttatgaggggttcctttacatgtgaagagtcactttttctttctctgaggagtcaaaaatacagtatgcttttacgacactgtattttcgacttttgataatttgattatagtatatctggtgaagatctctttatattctacctaactgaggttcttcaggcttcatgtatctggatgttcattttcctctccagatttgtgaaattttctgtcattgttactttaaataaattttcagtcattttctttttctctgttacttctagaatcttcgtaatatatatatattgtttgcttgatgttcagctgtaacttctgttgtctttcttcactatttttcattcttttatctttctgtgctgctgaatggcaaatctcaaatgacctgttgagctccctgattttttcttctgtttgatcaagtacaaatgcttctcaaattacagtagtttgacttacaattttttgactttacaatggtgtaacaccatcacaattttgttatactttaaattttgaactttgatctttttccaggctagcagtaagcggtacatgagatgttcggcactttattataaaataggctttgtgttagatgagtttccccagcatgggctaatttaagtgttctgaacatagttaatatgggctagactaaactgtgatttttggtaggctaggtgcattaaatgcatcttttacttacaatattttcaacttacgagtatactgaatgtaacattgtaagttgaggaacatttggatgctcttgaagctttctaagggttttttctgttcagttattatgttcttcagtcccagaattcctgttttgttctttttttatagtttctatttttttgttaaacttctaactttgttcatgtattttttttaatgattttatttggttgttttcttctgtagttcactgagcttctttaagaggattattttgaattatttgtcaggcagttcatacatctctattttttagggctagttactagttcttttatttttttctcttttagttatgtcagatttccctgattatttgacttttttttttgtcttgcattatgatctatgtatttgaagaagtaagcacctcttccagtgtttttttttttttttttttttttttttaaacggagtctcactctgtcacccaggctggagtgcagtggtgcaatctctgctcactgcaagctccgcctccggggttcatgccattctcctgcctcagcctcctgagtagctgggactacaggcgcctgccaccatgcctgcctaatttttttttgtatttttagtagagacagggtttcaccgtgttagccaggatggtctcgatctcctgacctcgtgatccacccacctcagactcccaaagtgctgggattgcaggcaggaaccaccacgcccggcctcatctcttctagtctttacagacaggcttcagcaaagagagtccttcaccaagcagcccatgtagagattctgagcaggatgtttctgggatatctgtgtacacttgctgctggagtccttgaaacagctggcctggtacctcaataagcagatgagtagccctggctttgggtccactaggtgcagcctgatgcctgggtctgcaggagtaggcagacatggaatttgggtttgcgtagatgggcctagtgcctcagtgcacaggggtaagcctgaagcttgggtctacaggtataagcctggatcctgggtacatggggtctagtgtgttgctggggtccactggggtggacctagtaactgtgttcatggttacaggactggagtctaagtccattgggatgggcccagagcccgagtctatgaaggcaggtatggggccaacatctacaggggctggcctgaatcctgaggctgcaggagctagcctggcactggggtgggtctgaaagctggccctgaaggggcatggtggcgaagaccacagtaaagtcatgtgttaacttcactcttcttccgctctgtggaggatatcactgttggcactgtgctgtgcgaaacaggcttgggggagaggagatgtgagtaatgtgaaactgtccttactcccatcttcaatccatctttctttatttctgtactttacccaggtgttgtaatctgtcatatggattccttagctcttggcaaagtattttcatgcatggatggttgtttaaattgatgtttctgtgaggagtgctggaaacttccttttcattatcttgccgatgttactccttcaacattatttttaaccacagaaagaacagaagctaaaatattaatatttcatttactatagtgtatacatagaagattattatgtatttgttcttatcagaatttgtttactttttaatgtgctaagggattatcaatgggggaacaattacttttactaggttagagatttatttgtcatcaaattagttgccaagatttatggtaatttaaaatatgtcataattttaaggggataaatagcatgaccatatgcagtagtttggggtttgttagtaggatgatgaagcatttgatgtaactggaaatagatagttaaacatgaactataataatgaaaacataatttgcatgggaggtgcaaaaacctgatggctactacaaaaatctagcataatgttcttacgtactgactgtggagcccagagccccctgggcaacagatgttgactgtttcatgataagaaaacatgctataaagtataaaataaagtgcttggcaatgagatggcttatatttgtatttaactgtggtcctaagatattgtgaatggttgttttcctaaacctgggatattgtgattatatttcaaaatgtgtggagctgattttaagtattatgaaatttttgcacttaatagtaaaattaacagccactaaaattacttttcaaatggaatttgataaagaaacttatttacccttttctgttttctcaacctatattaatgttaaatgatagagctcctagttctctagaattactcaatagatcatggttatatttgtagtttgctttgggtgggattttagattagactttacttgaagtagcagtatgccttcttttaagaagccattaaacttcattcactttctatataaatatttataattcaatgattatttgttattttggttaatgttgaaggatagtaatggtattggcatatttcccactgaaactaatactatatatttaagtactcgtcaaagtaaaaggccttcttttaataactgagtgcatctattcatttattttataataatagatttcaaaaagggccagaagtcccagctctattttaccaaggatagccaaatggatttaccaatggatatccaaattggttaagtggcttgtccaagttcagcaaacatgctgaagttcactgctttttaagcttccctaaaatgacccagccctcataaatgcttataaagctttaatccaaaacatctttggcatgtcttctaagaaagagctttgaaaaaaatgtaagtgtgctgcaataatgatgtactcagctttttcttttcccagaagttttagtatatgacggaaatgagttctaatatcagaattatatttttatttgaaaagctttagtttgattatttgtattttacatagtaagctataataattctcatgactcacatgtataaatatataacattcaaaattgtcaaaggcggtagtgaatgggtcatttaagaagtacaataacatatatattctatgaaagacaaaacacttatggatgaaatgaacaacaaaatcaaagttaagtatcaaaagagaaaaggagttagagaaatattttaatagaagtaccttttcagtttaatatttcaaatgtaattttaaaataaaaaactacaaaaatgtatatttcagaaagtatatggtagttttcaaatcttttaaaaagaagcaattgacaaactgtgggccaggtaaaacctgggtgtaaaaggaaagttagtttgctgcccataaggagattaataactttgtggggtaaaagagacattgagcagcagtgtattagagttcatattacagaggaactggagattttgtaaggtgtcccatttttctctgtcacggataagaatattttgataatagtgaaattctgatcacatcacaagatgtatttctggtgttgaaacaagacaattaactggctttggaaaagacttggatagttttcaaactacccacgtataataacaggaaaactgcatagacaaagaagtcgatggggagaaaaaataaacacagtgtaagcttagcaccagagattgcaggtcatgaggatctgtgtagtgagccacacagtaaaataaatacaatctaaacaaataaagcatagtgcattcatttaaatactttaaaatatttaaaataaataaatgaagcatagtgtatttgttggttagtgagaaaaagtagcaggaaaggtgactctgaataatatagatattaagttatgaagtgtgaggccatctctaatatgttaataacatgaacacatactaatccatcattgccatgttgaatgaactttccaaagggttcattcctttacctttctgtagagaggtggctgtcagtttccactttctgaagttttcaaatgttctttctctctttctctttccctctttcgatacaaaaggaagtattggaagaaatgtcctcaaaaatgttttgagttcacagcaactttatcaaacacaaaaataaataaataaataaataaataaataactggaaatattgttatgaggtcaattttccatttatcaaaatttcctttcttgacaaacacaattcactggtcattttaagttttaaggaaagtgctgtatttaatggctcatgcatattttcattgcttgaagtagtccatagtttattgattgcatattctttctcttcagcaaaatggcagtacattgatgaagaacatgggatcccgtgggttaacaccacactagatgtaacctaacactcttagatgctcgatgtgtaggccagagcctcctagtctataatgtgagtaggacatatactatacagcatgagataaagtttaaacaagttagtgttcaactgtaggatctcagagcaatctaaagcactgaggttgcctagggacaaacattttcatgaattctatttatttatttatttatttttattttttagatggacaggaagtaggatttattggtgagtattaagagggggaagcacagtggaagccctcatgagtgcggggcctgccacttgtccagagggccatgactagggatgtaggcgaccccacagccatctgggatgagctgcttctcagccaccatgtcttcagattcattcgcattgaatttggtgaagccccacttctttgagatgtggatcttctggcggccagggaacttgaacttggccctgcgtagggcgtcaatcacatgctccttgttctgcagcttggtgaggatcgacatgataacttggccaatacaaaccccggccacagtgccctggggctttccaaaggcacctcgcatgcctatttgagcctgtcagccccagcacaggacaacgtcttgttgatgcggatgacgtggaaggagtggagccacacccggatatggaagccatctttgccacagctttttaccatgtacttattggcacaaattcgggcagcctccagggcttcagaggacagctgctcaaattcatctgacaccatgtggccataaagcggaaactcatccacttttaccttcttccgccccaggtcaaagatgcgaatcttgacatcaaggacaccttggcagaagcgagactttgggtacggcttgttcttacaataccggtaacaacccgcggggcggcggcccatggcgacaccaggatcttcagtagtgctctcaagggaaagagagcatgaattcttattaatataataatttatgtactttacctcaatttatttttattttttatgtttaattgacaaatagaagtgttatatgcatatttttttttctttttttttttttttgagacggagtcttgctctgttgcccaggctggaatgcaggggcgcaatctcggctcactgcaagctccgcctcctgggttcacgtcattctcctgcctcagcctcccaagtagctgggactacaggtgcctgccaccaagccaggctaattttctttttttttttcgtatttttagtagagagaaggtttcactgtgttagccaggatggtctcgatctcctgacctcgtgatctgcccgcctcggcctcccaaagtgctggggttacaggcctgagccaccacgcccggctgaattgtatatatttatgctgtacaacatgtacaatatatatccaacatatatcttgggtatatatctagacactatggaatggcagaatcaggctaattatcatattccatttcctcacacacttaccatttttgtggtgacagcacttaaaatctacccttttggcacatagtacattgctgttaagtatgatcactgagtcctgaacttattgctcctaactgaaattttaaaattgatttctttcttatcttcctgtctttacttggaagccaactattgtttttcttggcttttaaatgatgggtggcatgctaatctgaggtccgttttgcaagttcttgagaacagattacccaaggaaacaacaaccatattccctagtgtcttatgatgtaaccagtggaatggtacccatgggaggagagggaagaggtaaaaacttggttgtggacctcagctcatgcaattttgctctgtcgtggggaccctctactgttcggctttccagtgttactgtgtgtattcttttatatgctgaggaagttgtaggaaagtaaggaaaataaaacactttttttttttttgagacagaatcttgctctatgccccaggctggagtgcagtggcacaatttcagctcactacagcctccacctcctgggttcaagggattctcctgtctcagcctcctgaatagctgggactacaggcgcccaccaccacacctggctaattttcgtattttttcggtagagatggggtttcaccatgttggccaggctggtcttgaactccttgacctcaattggttcacccatctcagcctcccaaagtgctgggattacaggtgtgagccactgtgactggcctgttcgttttttacatcagcatatctgttactccccactaaggatgaggaacttcgcactggagcaagatgattaggagaaaaatgaatctgctttgccacctagtttggggggaattgatggagcacacacttctgagggacacatgatctctttctcagcagtaacttgctaatgctgtaccagctttcagcttgtctggaaatggcaagagtgttttatgagtgtcttatggacacaatgaatcagctttacctcaaaataaaagttaaaaaaaaatacattctggcttaccccatgatacaatgctaagtgcattcataggcacacacacggagtctttctgtctaaaaaacagcactgtgtttacatcctgccacctatctcagagggactgactaagacttggaaaactctgatgatatcctttaatcttttccttaatatgggaatatagtgtttaatctttgtacctttttatataagttttcatctgaaatggttttttttcaaatgtatttctcttaggttgggtgcatggtggcacaatatcatgccttattatttaacgttcacatctccctcccaataatttaaaccatccaaatatttgttgataattttcgtattcccatttcatgtttgcacagccaaataacacatgtaaaattcctttaatctctccatacaaaataaatcctccattgctttaattattcctagtagtgctttctgaacttttaccagccttgcttggcagaattatggtgagaaagttgaatccaggctgtcagtagcaaagtgtttgccatgctattatccttggcaactgcaggcctcctccaggctacaaaacagctcagtgcctacctccttttccctgctttctactggcctacaaattccagctgtggtcagctggtgagctctgagctacagggacggcgtggcgcatgttttgggcttgactcagggatcatgtaatgttgggacagtgaactttccgatgggagccaataacacccatggttgttttcacctcctgaccagaatgtctcaacttaattcaatcatctgaacatcaatgagggtgactggaaaaaattttttatcacagcactaaaataaaagcaattccaagatgttttcttttccattgcacattttcagagctttgattttcctggtaaaatgctctttgcatgtgccatgttcccagattaggagaagatgatacccaagggagaagaggtaaaaatgcacataaataattttacaccatgacaccgtggttaaggctttcaaggatgcttttaatgatgctatgtgccatggttttaaaagtcactatcaagttatttatttgtatatattttgtttcctcttaaaaactctttaaataaataaaagaggagaaattgtacaaatttcttcttttactgtgtacctactcttgctttgtgtttatgagtgaagagagatggggaacatacagaatattaagtggtatatttaagatacttgttcattttaagatttaggcttgcaatttaggtgtgcctaatttgtctgctttgggagctcaaaggtcaagttgccaccgcaattaagcatcaatattccttaatttgaagtgttaaaaaatatgtgtgtgtgagcgtgtgcatatctgtgttcaactgtctgcctttattagttttctagtcctgctgtacataacacatcactatagacttaccaccttaaatacataggtccaaagtctgacactgatttcattactggcaacaggttctttgatatgaggcaaaaagagttttcccagacaagtcttcactggagcttgtgccagggcataagggagacagcaagagagaaagagagagaattccctaattccactagaagagctgtagggcttttttgttaggcaaagcatggaaattgacatgcaagttgggctggacaaagcacataaagggtagagcacaggctagcattatctggttgcaatggttgagtaatgaaccatctggtggtctggccagtggcaacaaggctgcattccttcctgaggtgggacactctgcaaccttggttatctcctaaggccagttcctggaattctttaagtaaagacatgtttaaatggtgatgtaagtgaggtaatggtgtgagttctgtgatcagtgagaatgcataaaagactccgctaggtgacttgaaactgagcttcgtctccaatctgcctcggtttctctggattaaaattgaggtatcagaagagtggggcttcttaccagagacagtgggaaaggatgaagctattgacagaattcagtttcttgtggttgtaggcatgaggttcccatctccttgtactctgtcagctgggaactggttgtatttcctagaattctctttccagtccttgtttgtggccacctcctatctagaaccagcagaggcatgtggaagttgaatggttctcatatttggaagctgtgtgacttccccttctgccttcctctttcaccacatctctctgacaccaggcagggaaaattccctgctttgaagggctcatgtgatcagattgtgtctctccagataattaaaaaaaaaaaaaaaaaaaaatccctactttgaagtctgtaacctaaaaattaccctatattaaagcctgtgtcctaacattttatctgcaatcatttttttgttattgttgttgttcgttggtttctttctttcctcttccttccttcctttcttccttccttccttctttcttccttcctccttccttccttcctccttccttccttccttccccctccctccctttctttctttctttctttctttcttcctttcttcttttcttttctttttttttttgccatgtactataagcagctatttacaggttctagggatttggtcatggatttttctgtgtgtgtggcagaaagggggcactatttagcctaagactttccagcatcctctttctctctctcaccctctttctctgcaacatggcctcaagagcaagaaaaaagataagatgccgagtcagaaaaacctgacttcaaaattctttcccctaccagcagctcactaattacccagctggtaatttgataacaggaattttcttcatcctttcaaagatttgtttcatttcttgttgtcgtatttacttcatcaggtaattgtaaaattgatgatatagtcagatgtctgcatctagtgctatgcctggcatacggcatgggagggtgcacttttaatccaattttatttcagaggaaccattgtacatcctgtttcttatcaaaagttgcttcatggcagttaccccaggtcactgagaccaagccagggctgtcattctcagagggggagatggaagggagtgatacaggggagggcctagcaggcaaaggaagttggaaactgtcctctgtaagcccagcacgtgggaagcagctgggtgcattaatttcacctttgtcatccctggcattgaaaaaccacaaccagcttacacggaaaggattctcaaatggaactttctcaaatttatggtgaaaaacactaggaaactgctttgaattgaagcatggcgctgatggttatccagttcatcctctctgctaaagccatttgactctcatgtgcttaataagagatccttggaaacattaagtgctatccaagaagcaaaaataaagcagaacaaccaaaacaaaatgaaaacaaaaaataagagcaataacctgcatggtaataggagaaaattttattttttatctattttcttcaaatcttgcttataggtaaaagagaaaattatttgagtaaatataatgcattccctaaagaaacaaaaaagatactcagaggtcctctgaaacccagctccccatcttcttattagactatgactgaacatttgcccaattggacatatcacaccctctggctagaatgtggtatttacattgttataaataaattgacatgtgtgtatagctctggtggggggaccgtggacaatagagcacatactgttcctgagttcatctcatgttccctcagtcagtttcagtcagagatgaatgttcatttaatcaggaaattttatcttgtctttaaaagccttggcaactgtaaatgaggggagatctaagattagtaatgtactctgacaaactcttctttttaaaaattatgtcagattttccagagcaggatttcagttttcttctacaaagtttattcttagcttatacaaaataggcttactctaaaaccctaatcatgaagtagtacattcagataatagggaaattaaaatatatcaaaatgaaacagcagaaagtaaacatgccatccttattttatgtcactggaaaaaagtgtgtgtgtgtgtgtgtgtgtttagcactagcatgtggcattacaggacatttaggttaccatttaaaatttctctaacaaattatggtaataaccatttattgaatctaacaaaatgacttcttttgaaacatggtagcctgagcttaattgtctgtcatcatctctatctaaacccctataaaaaatttctgtctcacaactttttttttgtgaaatgcttaagttcaattatttttaattttgtttgctttttaataaatatattgaaggttaattttattttaataactaccttagtcatatcacatacattttgaaaggcaacgtattcatttctaaataatctttccgtgataatacttatttttcaactgcaagtttattggaagagtgttatttaaaaagattgtaggggttgtaactatctgtttaccccttcattcatcgagctatccatcaatgcaagcatcagtcttccaaatcagtactatttatctctatcatttcttgtgtatattttgttgttaattctattttgactctattgtactcagagaatatatatttgtgctacatgtagcacaaaaaacaatgagttgaacaacacagtttagaaatgctaaagcagaaataaaggtttttcaagttgtatctcacaaatctataataataatggaagaaaatccatagcccttttagtatcaatagttgaactttatattctctgagtacaatagagtcaaaatagaattaacaacaaaatatacacaagaaatatatattccccctagcctcaactcctcaggctctgataaccacggttttgctctctactgctgtgacaccagcttttttagattccacaaatgcgtaagatcatgtggtacttttctttctgtgcctggcttatttcacttaatgtcatacaggttcatctatgttaatgcaaaagacaagatttcattccattttatggctgagtagtattctttgtgaatctatatctataccacattttgaatggaacttgtagtttcttttaactattgattaaaaagttagaattaaatgcgaaaagtaaacgtatatatgatgtatacatgtatgtatgatgtttgtatatatgtatacatatatataataatgtgagtgccattttaaaagattgtctctaaatattgggtcgtgttacaaagtaaacctcaaggaattagaagtaaacatttaagacaggccgcacaattaaattttgtatctttattttagtgactaaatatcttgcttcacagctttccagccttagtaaatgggtggttgattcaagctaaattcaacatatttaaatttaaatttcttatcacagagccatctttgtttatcctattttctcccactcactattttgtgctttgtaattacttactacaggaaactgcacctaatatgtatggtactttatacaactgagtactttctaccaaatcccgtgaatgaagccaggttctatttatcttcaattacataacttaggaaatatgagggatattttatatcttctaccaatttatattattccatccattccttcattcagcaaatacccattgagtgcctatgatttgtcagtgttatgtttctgtgtcttaattttcttcaaaatattttggttcatgcagagtcggagcctcaccagacaccaaacctgccagcatcttgatcttggacttctcagcctctagaactgtgaataataaatttctactatttataaatcactctgtttttggtgatttattatagctacatatggttaatacagatggactaagatattcatgtttaccctgcttcagatagagaattttggtgaatagattgtaaactgaaggaagactttagagtcaaaaacggaaccagcgtgggtcaatactgtgagttgagttgatttgggcttgaatacaaaccacccttccaaaggtgaggtcaggtgcactctcagagcccctcagttgaatatcatcctgtggcccaactccagaaggagacctttaatcctccccaagaaatctgggacaagggaaaaaaacaaaaaggaaaaatccatattttcaaactttttacaagtgacctctgatttccccttacttttcacattcattcatttttctaggtagatctaacaaattacttgtcaaaaataaatcagcagtcaatagtgctaatttaatggctgcatatttacagtcaacgtatgagttgagatttcccttatcattcagtttatggtcctaaaagtctttttaaagatatgccacatagtaaaattgaagattgttctctttagggatgcaaatatgtagaaaaggtaaacagagttcccttttcagtgaaaactagccagaaataaagcaagtactaataatatacaagagcagattaactcaaaggtaggtttgtaccagtcagttaagtagaagtcatattatctgactttatcattcttccctctaaggatgtggcgacaaatatatatatatattagcttgtttaacacacatatatatatacacatatgtgtgtgtgtatatatatatttagtgtgtgtgatgggtaatcgtatgtgtcaatttgactgaattaatggatgcccgtatcactggtaaaatattatttctgggtgtgtttgtgaggatattcccagaagagattagcatttgaataggtagactgagttaaaaagatcttccctcactaatgtggctgtggagggtggggtagaggggggcagggcatcatctaatccatccagggtccaccagaatagaacaaaaaggcagagaagatggatgtcccagctctctccttgagaggatgagattatcattgaaaatctcttcttgagctgggacatccatcttctcctgctcttgaacagctgagttcctccttgttctcaagcctttggacactaggccttatgctaacagcattcctagtattcgtgacttcagtcttggactgggaattatgccatcagttcccctggttctcaggcctttgaactctgactgaattacttcaccagctttcctggttctccaacttgcagatggtagatcgtggaacttcttgacctccataatcatgtgagccaattcccataataaatctcctctatatatctatatatatcctattggttctgtttctctggagaatcctgactaataaagtatgcacaccagcttgctccatatttattccctttgcacagttcatgctgaacagagcttctttaactctaatgtggaagaatttcaaagtgcttaatgatttacaaaaaatgcattgtgctgacattacagtggccaaaatttttcccagttctcatagactcaaggccaagaaaatctcactggtgtgattagaaatgaaaggaaattcttagaatcactaaatagttgaaaaagtatagacctgctggattgtcgttgcccctgtgagtcacatttctataattaggtcagcatgcagttctaaaaaaaatggagacaactcaaataaaataaaataaaggcttgaaggaagttggcttgtgcagaacaccaactcacatgattttaatgttcacactataaagtaaatcaatgtttgcacaagctgtaggaaaaattgttaaataaccactctaaagaaggcaatctagacatacaattatgtgtgccattattgaaggggttaaccagggacccaatctgggggccttgaagagaagtgaaaaatagaattctccaagaatcaaacacacagaatggaaacatacagttcccatttgtattaattatgacttttttggttgcaagcaacagattcttcttatagcttgtttaactaccgtaggggatatggtataataacacaaggttgccacacatggatagggatgaatctgggctcctgaagagatttgaatcagtggctaaggttaaaagttaaaatgtaaaatagacatatatgagtgcatctatgaagtagtgagattagacagatgaatttatgagttttcgatttgttagattgaaaacataaatttgggtatctgtaaagccataaaactgtacaggattaactcaggagagtatttagatggagaataaaaatgattaagttctgtgtgctgaggtcctccatcattttgggctcagaaaaaggaggataatctcacaaaggagatgaagagagagaagtaggtgagataggagaaaggctgagaggctgagatttcctgaaaatctaatgcaaaaagttttcaagaagaaggaagtgataaacgctaacaactactgtattgaagtggagtgaattgggactaagagttttggggttaacaagatagaagtttgtgaaaatttcgacaatcacattttcagtggcataagggacgtaaaagcctggctgggggctttaaataaaatggaagtggtggcagtcaaatattgatttctttttgaggatttttgctacaagaatgggagttaggtaatagacagagagaaatgtggaaccaagggaatgtttgtttttggttttggttgttgttgctcttgctttgtgtattatttctatttttaatagaggagagagtaatgagtatctgtatgctgttagaagtgatccaagataaagaaaaacctaattatggaagagatagaagagtcattgcaagagtaaagttcttggctgggcgtggtggctcacgcctgtaatcccagcactttgggaggctgaggcgggcggatcacgaggtcaggagatcgagaccatcctggctaacacggtgaaaccccgtctctactaaaaatacaaaaaaaaaaaaaaaaattagctgggtgtggtggtgggcgcctatagtcccagctactcaggaggctgaggcaggagaatggcatgaacccaggaggcagagcttgcagcgagctgagatagcgccactgccctccagcctgggcgagagagcaagactccatctcaaaaaaaaaaaaaaagagtaaagttcttaagctgatgaaaaggtaaagaataaaaggaaacaagtgaggagggaaaatgggtctgaggaacagggaagtacttctttttattattattatattttaagttctagggtacatgtacacaacatgcaggtttgttacacatgtatacatgtgccatgttgatgtgctgcacccattaactcgtcatttacattaagtatttctcctaatgctatccctacccactccccccaccccacgacaggtgtgtgatgttccctgccctgtgtccaagtgttcccattgttcaattcccacctatgaatgagaacatgcagtgtttggccttccgttcctgtgacagtttgctgagaaggatggtttccagcttcatccatgtccctacaaaggacatgaactcatcattttttatgtctctatggtattccatggtgtgtatgtgccacattttcttaatccagtctatcattgatggacatttgggttggatccaagtctttgctgttgtgagtagtgccacaatagtggattggttccaagtctttgctattgtgaatagagctgcaataaacatacgtgtgcatgtgtctttatagcagcatgatttataatcctttgggtatatacccagtaatgggattgctgggtcaaatggtatttctagttctagatgcttgaggaatcgccacagtgtcttccacaatggctgaactagttcacactcccaccaacactgtaaaagtgttcctgtttctccagcacctgttgtttcctgactttttaatgatcgccattctaactggtgtgagatggtatctcattgtggttttgatttgcatttctctgatggccagtgatgatgagcattttttcatgtgtctgttggctgcataaatgtcttcttttgagaagtgtctgttcatatcctttgctcactttttgatggggttgtttgattttttcctgtaaatttgtttaagttccttgtagattctggatattaggcctttgtcagatggggagactgcaaaaatcttctcccattctgtaggttgcctgttcactctgatggtagtttcttttgctgtgcagaagctctttagtttaattagatcccatttgtcaattttggcttttgttgccattgcttttggtgttttagtcatgaagtccttgcccactcctatgtcctgaatgatattgcctaggtttccttctagggtttttatggttttaggtctaacatgtaagtctttaatccatcttgaattaatttttgtataaggtgtaaggaagggatccagtttcagctttctacacatggctagccagttttcccagcaccatttattaaatagggaatcctctccccatttcttgtttttctcaggtttgtcaaagatcagatggttgtagatgtgtggtattatttctgtgggctctattctgttccattggcctatatctctgttttggtaccagtaccatgttgttttggatactgcagacttgtagtatagtttgaagtcaggtagcatgatgcctccagctttgttctttcggcttaggattgtcttggcaatgcgtactctcttttggttccccatgaactttaaagtagttttttccaattctgtgaagaaagtcgttggtagcttgatggggatggcattgaatctataaattaccttgggcagtatggccattttcacgatattgattcttcctatccatgagcatggaatgttcttccatttgtttgtgtcctcttttatttcgttgagcagtggtttgcagttctccttgaagaggtccttcacatcccttgtaagttggattcctaggtattttattctctttgtagcaattgtgaatgggagttcactcatgatttggccctctgtttgtctgttattggtgtataggaatgcttgtgatttttgcactttaattttgtatcctgagactttgctgaagttgctcatcagcttaaggagattttgggctgagacggtggggttttctaaatatataatcatgtcatctgcaaagaggacaatctgacttcctcatttcctaattgaataccctttatttctttctcttgcctgattgccctggccagaacttccaacactatgttgaataggagtggtgagagagggcatccctgtcttatgccagttttcacagggaatgcttccaagttttgcccattcagtaagacattggctgtgggtttgtcataaatagctcttattatttagagatacattccatcaatacctagtttgttgagagtttttagcatgaaggctgttgaattttggtgaaggccttttctgcatctatggagataatcatatggtttttgtctttggttctgtttatatggtggattacatttattgatttgcatatgttgaactagccttgcatcctagggattaagcccacttgatcgtggtggctaagctttttgatgtgctgctggatttggtttgctagtgtttgactgaggatttttgcatcaatgttcatcagggatatttgtccaaaattctctttttttaattgtgtctctttcaggctttggtgtcaggatgatgctggcctcataagatgagttagggaggattccctctttttctattgattggaatagtttcagaaggaatggtatcagctcctctttgtacctctggtagaattcggctgtgaatctgtctggtcctggactcttttttggttggtaagcttttaattattgcctcaatttcagagcctgttattggtccattcagggattcaacttcttcctggtttagtcttgggagagtgtatgtgtccaggaatttatccatttattctagattttctagcttatttgcatagaagtgtttatagtattctctgatgatagttcgtatttctgtgggatcggtggtgatatcccctttatcattttttattgcatctacttgattcttctctcttcttattagtcttgctagcggtctacctactttgttgatctcttcagaaaactagctcctggattcactgattttttgaagggtttttttgtgtctctatctccttcagttctgctctgatcttagttatttcctgccttctgctagcctctgaatgtgtttactcttgcttctctagttcttttaattttgatgttagggtgtcggttttagatctttcctgctttcttttgttggcatttagtgctataaatttccctctacacactgctttaaatgtgtcccagagattctggtatgttgtgtctttgttctcattggtttcaaagaacatctttatttctgccttcattttgttatgtaaccagtagtcactcaggagcaggttgttgttttccatatagttgtgcaattttgagtgagtttcttaatcctgagttctaatttgattgcattgtggtctgagagacagtttattatgatttctgttcttttacatttgctggagtgctttactttcaactatgtggtcaattttggaataagtgtgatgtggtgctgagaagaatgtatattctgttgatttggggtggaggcttctgtagatgtctattaggggtggagacttctatagatgtctattagatctgcttggtgcagagctgagttcaagtcctggatatccttgttaacttcctgtctcattgacctgtctaatgttgacagtggggtgttaaagtctcccattattattgtatgggagtctaagtctctttgtaggtctctaaggacttgctttatgaatctgggtgctcctgtattgggtgcatatatatttaggatagttagctcttcttgttgaatttatccctttaccattatgtaatggtcttctttgcctcttttgatctttgttggtttaaagtctgttttatcagagactgggattgcaacccctgcttttttgtgttttccatttgcttggtaggtcttcctccatccgtttattttgagcctatgtgtgtctctgcacatgagatgggtctcctgtaaacaacaacacactgatgggtcttgactctttatctactttgccagtctgtgtcttttaattagggcatttagcccatttacatttaaggttaatattgttatgtgtgaatttgatcctgtcattatgatgttagctggttattttgcttattagttgatgcagtttcttcctagcatcaatggtctttacaatttggcatgtttttgcagtggctggtaccagtttttcctttccatgtttagtgcttccttcaggatctcttgtaaggcaggcctggtggtgacaaaatctctcagcatttgcttgtctgtaaaggattttattcctccttcacttatgaagcttattttggctgaatatgaaattctgggttgaaaattcttttctttaagaatgttgaatattggctcccactctcttctggcttgtagagtttgtgctgaaagatccactgttagtctgatgggcttccctttgtgagtaacccgacctttctctctggctgcccttaacattttttccttcatttcaaccttggtgaatctgacaactatatgtcttggggttgctcttcttgaggagtatctctgtggcgttctctatatttcctcaatttgaatgttagcctgccttgctaggttagggaagttctcctgggataataccctgaagagtgttttccaacttggttccattttccccatcactttcaggtacaccaatcaatcataggtttggtcttttcacaaagtcccacatttcttggaggctttgttcgtttctttttactcttttttctctaaacttctcttcctgcttcatttcattcatttgatcttcaatcactgatatcctttcttccacttgatcgaattacatacactacctgaagcttgtgtatgcatcaggtagttcttgtgccatggttttcagcttcatcaggtcatttaaattattctctgcactgtttattctagttagacattcgtctaatcttttttcaaggttttaacttccttgagatgggtttgaacatcctcctttagcttggagaagtttgttattaccgatcttctgaaacctacttctgtcggttcgtcaaagtcattctctgtccagctttgttccattgctggtgaggagctgagatcctttgaaggagaagtggtcctctggtttttagaattttcagcttttctgttctggtttctccccatctttgtggttttatctacctttggtctttgatgatggtgacctacagatggggttttggtgtggatgtcctttttgttgatgttgatgctattcctttcagaacagggaagtgcttttaaagaagaaaaagaagagagacaatgaatataggaacagaaatataatcaaagttggcagagaaatagaggctgttctacgagaaaacaatgatgcaaagaaagagaaaaggagagataagaaatggagagagagatgtttttaataaaggacacttcattttcctttgcaaacctgctctactcactctttcctatctcagtgaaaagctctattattcactgaggtatgaagccataaaattatagtcaacctttcctgactctacacatccaatccatcagcatgtcctttttgaattaccttcaagataccttaaatttccacaattaccaccatttctcagctatctctgtagtcccagcaaccaacctctttaacctgattactgcaacaattcttcaaaaaccttacatggagtaactcttagccctttacaactccattgtctacataatacgtgaaacaatgttttacaaaagcaattcagattctatcattctaatgttcaaaacttggagaggcttacagtcatcctttgaataaatcccaaactccttagcatggtgtcaaggcctagcattaactggcattttcctacctctttgaactaacttcttaccttgctcctctgatcagtgcttttctgtgatgctctaacacacaatttctgcctcaggacctttacaattgctgttctgtctatctaagatgctcttcacctggctgtctgcattattacgtcctttatgtcatccacgtcttaatttaaatgtcatctcttatagaggcttatctgacccagctttccacaggattcttctttccctagactgtgctatcttaacaccctcatttattgccttcatagtcctcatcacatttaatccttgagtgtttaaatcctcatttcctctatcctccatagctgcataaattcaatgaggtctgagactcctcctttacaaagacttcccaatttaatacaaagtagatacttagacgtgttggttgaaagatggatggatgaaaggagaaaggaagaaagaagaaaaaaaatgaacattttcaagggtggatttgaattttgaaagccaaaactcatttggaatttctaatgtaaatgtacttcataatcatgctgaatagctgaaaaatcaaggtgaaatatgacactgactttcttgagactaatatcatatttgaagaaattttaaaaattattataaattgaaatatattttagaaataactttatatacataagtgtttttagaaaacgacatatataggtgtaaaaggtaataaaattaaaatactttgactcatgttactcttgttcttaaattccttcaatgacagtacaaccagcaaatgcttgaaactctctaatataaagttgtttattgtgcatttttagcttatctctcctgctttatctctagttacacattccttgtattttgtgatctgaccatggataattagcccccttctgactgctattcccttctcatcaatccatggatggtttatctagcccatttttatctcaaaactcaattcatatatcacttctgcctgtaacttttaccaactggacacccttccagtctagatatgagactttgcacttggctcccaaggcatggtgcatagaacaccctcagcctgtagccttctcctctcctctttctcagttcgtctttcttcaggatacagatgctgatatggttgttcagacttcaggacatgtgggtggagtctattcagacaagtttgtactcccctcccaagaaaaagctacctctttttttcctacattttcaagcttcatactgcatttttttcagaattgccaatagtagccttatggttgtgaatgtggagaaaagaagcattgctacatttgggggcttatgtcatgtactgcgatgtgatttctagaatacttttacatggggtattctttaaagactcagttaacacgctcatttgctattttttctgtgcatgtgcttcaagtatccagagaagaaaagggaaagcataattgtcagagatgtttagatgtttagagttagaactgatttactacattgtatcaatattcccttgagggtcaccattttccttacattattggtcaatgtaattccaaggtctacaactgaactaagttctactgggaactcaatatagtttggttgaatgaaagactggttcaatgaatacatgaaaatgttctatgtattctatatgaagatgttttaaaattgtgctgttttttgttgtttatttacttgtttggttaatttgtttaatgacttcattaccttctctttagccggaatctgtccaagagaatttccttttaggctttaaagctgaatgtattggaagcatttgaaactacttataagtctaataatgaccaacagaattgcctgttatttattttcttcaaaaattttaaatgtgatatttaaacatattaaaagtagttaaactgtttcctagttacatgttttttgcttagttaggaaggttttatgcttttgttaaccttcaaaagcaaaggaacaactgtgttgtctggtttaggtgagataaattccagctttctgctccttaattttgtcatttgtacaataaacaaatgatataacctatttcatacagtgatttcgaggattaaataatattattaaatcacataatatttagtgttatttgctaacgttcttaccatagttccctaaatatactaaaacttaaagtttgtcattgcccaatcataaactggccaattagcagcttgatgataaaacagaagtagatgtttttaattaaaattagactataaatatagactttaaaatttttattatgagttaaaataaattcaataaatgaattgggaatgaaatacatataggcaaagatttaattctaactgaaatctgaacatttgccctattgatatgcacaggagacagggaaatactgtgtagaagagagctgttccctggaaaaggccctaccctccagcctgaagacccaagtccctaaatgaggacaggcatttctgttttcatgccccaaaagttgccttttggcctgccataccccctaccctgcacccatataatccctgaaacccaggcaagccagcagatcagcagatggacggacagcagaatgatgtggcagagaaagagagaagaggaggaacatttgaatgccaagaggagttcgactgggggtggttggagaggaatccagctgctgggtgaccctcttccaggggaagaccaccttttcactccatcccccaccttccatctccccatctatcccatcaaaagccacctccaggtgaagaccaccttctcacttgatccccaccttccagctccccctccatcctactgaaagccacctccatcactcaaaatctcacatttatccttcaagcccgagtgtgacctgattttttctgggataatgcacaaaagctcaggatacagaaagctttcacagtggccctctgcccttttgtaagggcagagggtccattgagttgattaatactcaagctgtctgtgggtggcaaagctgaaagagctttggggttgtaggcacccactcgtagacattaccttggggctagaccccaaagcactcacccccagcctctgcctgtctccatgatccccctcccaccaaggatttaagcagtaggtgactaaacatgccagccacacccctgtccttaaagggggaatgctcccatttcactatcttctgaaatgcaaatgtaacacgcagctccttcagctcccaatctttctcctatatcttttattctacacaaccctaagaaagacattttaatgtttaagggaggaactcaacaaaggaatctataatttatttaaaataaatgcatttttacacgtaagacttaaaaaccccatgtctgtgtcatatataccactttaaagtgacatattgtacttgagtttatttatagagaacatttgtatgaaatgagagtaatgataattattgcctatcttagactgcttcttctgatagcaatagcctcttatgagtggaagtcaacagatgaatttacaaagcccacaaaatcttacaaaaccatctttcctttacctaatctaaatctgacagaggttttagtctaaatgtcatttttatagagcatagctatgtattaccctaccttcaaccctttcattttatttttaactttatttttattgttttctaactttattgagatgtaattcataattttttaatatactcacagtatataatgtgatgatttgatatatgaaaaattgtaaaatgattgctacaatcaagttaatcaccacttccatcacttcacttagttactatttgtgtgtttatgtatgtgtttgtatgcgtgtgtggtaaggacacttaagatctattctcttagcaaatttttataaagtgactttttgcaggtgtacctctcctctcattccattctgctatgtaacccttccacatcccatgttgtgtttagttggttggagaagcttccttaagtatatcctagacttgtcaaattttatggtcatttttcttcaaattttatatttggattttgattgccaactggtctccataagcatgattaacatttagaagggtttttggattcttaatcaactaggattctaaagttgaccagcttttattacagcctataaagcaatcgtgatccaagcttagaatcttaggtgtaaaataaatataaaatatgtaactattgggcttttctttatctaatcatattacacaacaaaatagcagcttctaatacttaatgtaaaacatttcagaacttccactctgctaatctcaagaaatatatttatttctctcatcctcaaaaagtctgaggactctagggatgcttatttatttcaaataattagtactagtgactattgtattatagacaagagattggaatgtctgaaaagcccattcaagaaccttattcttatttgacttctgtgacttacatagagttcctgctgaaacccccaaatatagcagttctgtgttatacttgttttgtctccactgtttgttgtggacctatatattcatcccggatgcattcttttctgcttgtttgtttagtcttaggataatgatcttgatacatagcccaagatagcttaaaagcaagtcttgatttcaagcaacagcatggacaaaggttggggtgggggtagagaacctttaaataatacggtattaaagttgcacacgtcaattcttctgacatccaaatgcccataacttagttgcaaggtgtattagggttcttaagagagacaggactaatagatcagatgtataaatgaaggggaatttattaaggagtactgactcacaggatcaccacgtgaagtcctacaatagacagtctgcaagatgaggagcaagccagtctgagtcccaaaacttcaaaagtaggaaaaccgacagtgcagtcttcgttctgtggcagaaggcctgagtgctcctggaaaatctctggtgtaggaccaagcatccaaaggctttagaacttggagtccaatgttcaaaggcaggaagcatccagctgtgagatggccagaagactcacccagtctgctctttccattcctgcttttatgctgaaggccgattagatggtgcccacccagattgagggtgggtctgcctctcccttgtccactgactcaaatgttaatctcctttgccaacaccctcacagacacacccaggaacaacgttttgcatccttcaatccaatcaagttgacactcaatatttaccatcacaagtttggaactcagaaaatttcagcctttattttgtgtggccaagggctatcctaagaataatttattagcattaaggtaaccaggagaagggctattggggtataactattgctgccattgtccacttctctggataccccacaaattcattatatcagtcttccaattataaaatatgcaccccaacctccacgagcaaccactcataagttctatgcaactgcttaataagagtgcccagcattttacaatgatattgagtggaatcatagccagtacccagaaacctaaaatacaaactatttctaagccctttcttctaatacaaagccaatacccaaagggggagtaatcccaagatagctgaacttaacctcttgtttagaaaagggtagagtccagatatagaaggctcactgaagccataataactatcaaatgcagctgggcaggaactgagacaactccaccgggcagcagagtaagccactggtctcattaagattttgttctgttatgagcggaattgtgacccccaagaaaagacattttgaagttctacatcccagtacatcagaatgtgaccttatttggaagtgtagtgattgaagatttaataagttaagacaaggtcacactagagtagagtaggcccataatccaatacaactggtgccctcagaagaggaaagaaacacagacaaggaacacagggagaatgcgacgtggagatggaggatcagagtgatgtatccacagtcaaaggaaaaccaaagattgccagcccagtaaaccatcagcggctagaaaggggcaagagaggattttcctacaggtttcagagagagcatggccctgctgacaccttgattttagacttctagactccaggactgtgggacaatacctttccgtaattttgagccacccagtttttgatactttgttacagcagtgggagtttcctttgtattcttccctctccatggccacatctgaagtgacctctggaaagtatgcacttggaagggaagcccaattttttttttttttttttttttttggagacagagtctcaatctgttgcccagcctggagtgccgtggcgcaatctcggctcactacaagctccgcctcccgggttcacaccattctcctgcctcaacctcctgagtagctgggactacaggtgcccaccaccacacccagctaatttttttttttttttgtacttttagtagagacagggtttcaccgtgttagccaggatggtctcgatctcctgacctcgtgatccgctcgcctcggcctcccaaagtgctgggattactggggtgagccactgcgcctggcctgggaagcccaatttttatagcatgcttcctcatggatcaaaggcagggcgtcaagagctatcttggatgttgtattactaccgattgtggccactacagcagtggtttgaatgacaggcagggaggatgcagattttgcaggctcttgatccctgttatgacacagaaaaactatttcataaaatcaataaacaacaattggataataaaatttttaataaaatgattgttgacaagtgtttactgaaacaatagaattaagagcaatactaattaagtattgaaaatgtcaatgcattttggatgtttttggccattttccacatcgttctatgagaaagataaatacgggctcaattagcctacaggcagacgtaacaaaaaccatgattctgataaggaaggcattccctgcatgcaacctgaaatacaaactgactgggaggccagttatttgcaggctggcaaatttaaaatccaacaatttctgtatttcaaactaaaacaagtaaaatagaaacaagaggtttagccaaagataactctagcctcacattttctcagtgtatctctgcttttgctacactgtttcagtggactcactcactttactcctttgttgagacacctcctctaaaaattgatgtgattccttgcatcttgcttacaattattattttcacttgcaattatgtcctatgtttcctcaatcaacagttttcccttctttactggatgatcctattagcaaacatgcttccatagcttctatcttcttttaaagcatagattcaattttaaaaatcaaacaaacccacatatctaccatgatctcatatttatcgctacctaccatcccatttatatcttcttctttatatcataactctcaatgataactaagtaatttatatgtatactctcttcttcccatctatactttttgaccttatttcagtcaggttttggcatccaccactgtctttaaactattcttttcatggtcatgaatgatatcaaagtttccaaattcaatggccaattctcagtcctccttttacttttccaagtcagtatattttgacagttaatcgtcctccagaagtaattgccaagtactatttctttcaaagcctttacattgataaattcgacatgtattttcccagtttgtttttcccatgactgtaaaagccaatgcctctgatataattccactttgatacttaataatcaaaacaatcttggccattctaaaatataattcttaattctttgcacaccacaagatagaagaaatgaaaacaaaaacaaatgagcaaataaaattctcttcttttcccaagagttttgtattagtcagggttctccaggaaacagaaacaatagggatgggtaggtaggtaggtaggtaggtaggtaggtaggtaggtagatggatacataggtagacacatagatagatacatagatatcttgtaggaaaatctgggttcttgtcacacaaccaggaaagattaggcttgcagacactttgaagggtaagggggatggaatttcttgggcgaaaaggagaaaggaaaacaacacgggaaagcaagagaggggttcctgttaacaggccctcatctcatagattgaatcccagtttcccatacaggaagaggaggggccaggctcctccccactgcagacggcatgaacttccggtggctccaccttgttctcccagtgcacagactgtacagaggttctccgggcacccctttatacttggctgtgatagatagatagatagatagatagatagatagatagatagatgatagatagatagatagatagacagacagatagatagagggatagatggatggtagagtactattataaggaattggctcatgtgattctggagatcgagaagtcttaaaaactgcagtgagcaagctcgacatccagcagaactaacggcctagttccagtctgagtccaaaggcttgaaaaccaggagagttgatggtgtggttctagtctgaatctaaagacctgagaaccaagagagacgatggtgtaagtgcccgtcagagagctggaaggctcaagacatgagaagactcaattctttagttttagtctggaggcagaaaaatatcaatgtcccagatcaagtaggcgggcaaacagacatctcttactcagcatttttgttctattcaggtcttcaattgactggatgaggcccatccaccatagggagaatagtctgctttacccactcaaatgtttctgctgattcaaatgttaatctttctagaaaaactctcacagacacattcagaataatgtttgaccaactgtctgggcatgccatggtccagtcaaattgacacctaaaattatcacagtatcatgtcacagaaaatggcaccattaagctcccagttgttcagatcaaaacatctgaagttaagcttgactcccttttttgtactccttacatgcaatccagtagaaatcctgggatctctatattcaaaacagctccattatccaactacttctatcatctccactgttattattttagtccaaactaagaccatctctcatcttggctgctgaaatagctttctaactcaactttctgcttcaattcttgtccctctagaatttattcacactgtatgtaacaaaattcttctaaaatacaaatcagatcatttcacttccaggaatgtaatctttcattggccttccttaatattagaaagaaaattccaaatatgtatgttgatttacaaggctcgctgtgctctaacccctggctaccctctgatcacatttccatttaccagcccctctgctgactatactctagctggagtcctgtctccttcttaaacagacttttccctgaggtaattttcactgagacattcaaatggcaagatgctttcattcattcagatttctactcaaatgtaaccacctcaacgtgatcttttatgaccatctacccaacttccatcaccatcactccctccctggctttatatttattcagagcacttaataatgcttgactgtttatcacacatttatcagttattatcaaggtcaactgccaaaatctaagcacaaaaacaaaatctgtcactgttatcaatgctgtgtgtgtgtgtgtgtgtgtgtgtgtgtgtgtgtattttaactcaatgctttattttccttccctttatctggtctatattgaaacgactccagttatcttcataagtttcaatacctgtaaaccacaaagtaaagtccatctatatcccagatgactccttaaagcttagacaatactgcaaatgcatacatggaaacatttaagatatgcatgcaaagaaatatggagataacacagctccatctgaattgagtccagccatcaacaaatatcttgccaaccattctcaagaatttagaaagatatttgtcttaaagtaatggtcttataatgaccatttgagtaatttttttcaaagcagagagttgctgcaagataaatgtcaccaacagtagaaacacaatattagtaactttcaagtgatagctctttcagtgaaataataactttaaagcaccgttctccccctcacagttggaaaatccaactcttctcagctcacaatacatctgacagccccagtttctcctaaatcccatcccataaatctcaatgataacatcagcctgggtgccttagcctgagtccagcttcagactctgagtaacttggaaacattatgggagtagacacatgtctacttcattccccactgtatacccagcccctagaacaatgcctgaatgcagtcagggctcagaaatcacaaagacttcttaccttactcattcttctcagcggctctggagatatcttacctcttcttccaaccagaacttctttggtgagcaataacccactaacccagaagcttgagggtaaaacagagctaatactgctggaaatcaagtccagaactttgatagcagtggctttattagtgtaagtgccataacatgctactctatgtgtgtgagtgggcaagagacaagcaatgaggaggctgcatatcttgtgccttggggttgtgcctattaatttctgaggttcaccttgttatcctaatcttaaaaggatatggcatttcaaatttgagcaaagacccaaggataagagctcacaaccttttgccattaggaataatgacgtggaaaggatgaacaatataaaccaatatgtttgaaacatgtcctcctgttttttattataaactattttaaatgctgacaaattcattttttatacagctatagcatcttaatgttagctaattttactatttagtaaatcttccattcattccatctcctagcctccagtcacccttcatcctgggagtgaaggtcagagaatagcaaggaggaacaactaatttagaggaaacccttagacatttcctatgtaaccattcaattagcaaagaaacgccagctttaacgtcatcatttgtgccttgacccagtgactgcccattaaacagaggaagggcaaagcctatcagtagcttagcaaccagcacattttccttcccacttaaggtgagcctctattcagcagcaattccggcccaattgacgttcatctggctgagtagtttccttcccctactgaaataggaagatcctacaattatgtgcttccccacggtcgagatgtcagggattagactcataaaaggcaaatcttagccaattggatgaatatcaagaatagagtacaattcccaaattagagagtctataaaataccgtctatttaccacctttttttaccctccgtgatcttatagcctatttgcctctttttctagattgccttacttaattctctggcgggaatgaggcagatagataaaagaaaagcaattgatatgcatgaatttaatctcacaaacggagtattttgtttatcaaagcagaaaagatacccttagggataactttattcacaataccatgagtaaagtaaatttcaagacaacatttgagggtaaataaactattctaaaaggtctgtcaagaaccattatccttgaaaatgttagcaataaataacataggtttcaaggaagttctacaatagggtaaagcaaatatgttaaactaattttcattttggtaaagaaataatattttgagaaatattaatgtaacttgggtttgaaaaatgctgtatcaaatgtgagatttttttaatctcatggacagtaaaatgctattctctgaaacagatgaaaatatgcttttttattaaataatatatttcaaacgtaacatatttattatgaaattgtgctatgatcttaaatatattctaaatttaggtaaattaaaaattattctagtaattggacaaactatttctgtcgaattgtgatttgtgtgcatgcaaatggagataaatttgactaaactccataatgtaacattgtcaattttttctaaaacgtgtaacctcttcaggttctgagtctaggaactaggcaattgcctctttgcttacaaataaaatatttgggatatgtaaacagtggttaactgtcacttgtgaattattattgttcaaatggtaggctcttaggagtaacttcaaaattattttaacaatatatttttcatcaaaaatatgtctttaatgttgatgtttcattctttattactacagaaatggtaccttagtttattaaagtttttctaccacatgaagcatacacagtatttagtatatggtcagatggtttaacctcaatttctggttgttttctgttaagaactgaaagaataggagtaaaccatgtgaaacaggaaaagaggtcaaagttggtcataactttaaacagctggggctcaatcgttggccaccttaaagttgcatgagggagggaaaacatgggctttccttcactggctttaatcctcccgtggtcaagggtatccccaagagatgttagcttttctacattacgaggttttttttaagcctcacctgtaccaggcagatccctttcagaaaagcctgagaaaaatgctaagagattcttggcagagctgaagcaagatgctgtcaggttcagctctgtgaagctgattgtacagctggagtagaggtgagctgagaggacttcacagtaaatataagaggtgtcctatggggtgcatctttgctcagatatccccctaacgagctccattaagtcaaattcatgagagaaacttcaaggatgcggaccagttgtaatctgttctaaagccttcacactgaagaattagtgaagtaagttccagtctcctgtacagccactggtactgatcattgttttcattgcctcttctctccacttttccttctatatctccctcacctttgaacagcactgtgggatgcataggttgtttgcttagtcagataatatcagtcttcatcctcaaaggatctaaggtcttagttgctttatattcgcaaagctgtggttgctgcaattgtattcttacaactagtgctgagaatacaagcaccatgaaatgaatgccctacttaatgcctcatgttcagaaagtagaccttcttaccctccttagtagcagcaacctcagctcctatattcaagctgaattacccctcaacagtataataactcttcgttttgtctgctcatttgctacaaaagcacaaagtaactacgttttactttctggttgagtggttcctcttctgtacgaaacaggtgctcctaagcaggacaaattgttctttttatacttaccagtgttgccaggctatggtcctctgttattcaatcaaagactaatctaggtgtttctgggaaggtattttatagagatgattaaaatacataattagctgactataactgagggagtttccctagatcatctgagtaggcctgatttaatagttgaaaggtcttcagagcagagctgaagtatctctggagaataagagattctgcatgacgacagcagcttcagactgtgcccaaaacttgtagcctgcctttcctgatggcctgccctacacattttggactttcggacttgcctgactgtatcttataatcacacaacatgcaggccaattccttgaaaaaaaaaaaaaaatccctccttaacccctgtaggtactgcttctcctactagatctgtttctttgattgaatcatcccgacccagtaggttctgtctctttctgtctctaagttacctattgcctggcacattgttttaaagtaacaagcttgggcaaattagtgatttgtcacaatttgtacttacagctcttttatatgccctctaaacactatcaactttaatttctttttataccacatcttttgttctataacaaatttccataaattcttgctgagatattagttggacatgtaacagacaacagataggatgttaactaaaagaatgtcaatgtcaccaagaaactgaacaagagccaagtttctaaggaatgcaaacaacatgggcagatgacaagtgacgggtctaatatttttatattagccattatttttgcacagactcaataaagaattaattaaatacccctttggaaccagggccatttcagtgagttacagcacttgaaactaaaattgaacattttaaaatgaacatgtcccatgaggtaaacattctctactgaaatatggtcagctactatgaaaacctaatgatttatcttttgagacccataattaaataataagtctcaaaccaatagtattgagataaacaaatatttataaattctgggtcattgaatgatagaagacatagtatcttaaatttagctgactgatttaacgtgatcaagccatttgtaagtggataccaatattaatgaatatcttttattaaaccctaatactacttttgtttatttaatatatatatttcttaagtatatgtagctgtttattttatatatatatttattaagtatatgtagctatacatttaatatatatacatatactttaatatatataatttagaaatcatatctttatatctatacctatatctcccatgaagttgaattaatctcagaaaactgaggcaacatctgtatttgtcagtatgaattcctgtatgctacagtaacaaacagttccccgtatatcaggcagaagttagtattttgctcatgccacataccccatgcgcattagcagctgcctctgctcacacagggcacacattagcagctccagtctgcttgatggaggctctaccacctcaatcacaaggtttcatggttgtgtgctgcctcatagctcatcatcttgtaactataccatcttcaacatgtggccttgatgtaagctcagtaagctaagagagaaaatggagaattgtgtataaactttttattacttcacctccagtgtggatcatactactcttgcttacatttcattagctaggaataattatgtgaacccaaccaaggtgactggaaaacacacagaacagtaagtaaccagagtgcttgttgagtaccctttcttcattacagtcctctcttacagtctgcaatgtacttccttttctctcatcttcttacataaagactcactcaacttctcccaaagaggtacacccaaaagtctcatgcactctttattttctactcaaaagatctccagagatgtgtggcatattaattaataaataaaaatatgtagtcaaagaggcaaaataacttattatattattttgatgtctgtcagaaggtagaaaatataataacagctattagaatccaagatatgttacaaatacatgaaagtatttatagatttatacaggttacaatgagtaatttccaagtctgacaattgtgttaattccaagatttgaagtatcattctttaaaaagttatggttaatgaagagtgaaatacatcaataattctgggacataggaacaaaatattaacataggaagagagaaaagaaacaatttggtataaataagcagtcactctaagtttcttaggacttactatttgatgactaggggctaagatgatatgtacacttatttacttaatttaattttcctttcttccaccacttgttgacctattataaatatagaattcctagcacattaaggtactatgtgatatttttgtgttttttctttgtctgtattagtcacaattctccagagagatcgaacataggatatatataaatagatatatgaaaggagatttattagggagaaattgaatcacacaattacagagactgagaatttactcatataattatggaagctaagaaattccataataggcagtctgcaagctgtagtaccagggaagccgttagtatggcttagtccaagatggaaggcttgagaactcttagtttgaaagcaatggcccaagagccccggggaccactggtgccaggcctggggtccaaaagtcagagaacttgaagttctgatttctaaaggcagaagagtgttcaggctctggagagaaataatttctccttcccctgcattttttgttttttaacatccatgccccttaccaattggatggtgccacctacattgagggtgaatcttccccattaagtccacaaactcaaatgcaaatcccctctagaaacaccctcacagacacaaccagaaataattatttaccagtcatttgggatccctcaacacagtcaagttgacacctacaattaatcatcacagtatctcaacagttgaaatggaatagaaggctaagttaacaattgtttcctatacactttgcttgacaaaatacatgagctgttcaacagtcatctttgcctttggggttcctttacaatagaagatggaggaagaatagcaggatacgtagtgagtaatatttaaattagtgaaataaatacaattaatattgaatcatcttgctattctcgtagaccccaattggaaacagtgcaatgtaataaaaagtgcacataactcagctgctttaatttctactttagaatgaaaaagcattaatctgtcaacaaacagaaatcatcaactcaaactattgaagataatgcaaatgcaagacacattaatattttcaaagtattaaaaaccagtgaataaaagaaagtatatataaaaattgtatgcatttctcaatcaaaattaaacatatttgttgattatcatcatgaataaatatgagggctacaaacaaatttactgtgtggaagtacctttgaaacatcatttaagtagaattaaaatttgctaaatactaaatttgaatgtattattttgtctggaagttacatggaaattccttagcatacttatcatttctatctcttataaaagtaaatttacttaatatagtctgtgctcccattgtagacatcagtctcttattaggtatatgggactaaagtttagaccatgtcctgtgggacccagttaactctctccaatcccagctcatgttattatccttcttacacatgatgtgacaaatgaatgccagtggctacaagggcaggtgaataaaactaacattccaagatagaattaagcctcaggttgaaattctctatgaagtaaatgctgtttatttggtttctgtcccctgtggcaccaaaattttaaatttagccatttggtagaactagggtagtttctatatgatgttaacttcagaaagttaacttgagcaggactaaatgtttcttaacttggaaatttatggccatggttaaacatctgagaaagattgattcccccatttgattaaaataaaaaacaagtaaacaaaaatttctagataaatacatgtatgcatgtatacacatatacccacatattacacatatatctatatacatagatatagacatacaaatataaagactaaataaatttcttacactgtgttagatcatcttatcataaagccatagagtgtggggaagaaaacagtctacatgtctatgtatttggctggtggagatcctcttttgcaggtttcatttattcctgttcaataaaatcttgtctgtagtgtatgctgggattacattttttccctccctccctcccttgcttgcttcctctctccatccttccctctcctctttccttccttctttctctcccttctttcttttttcttcctccttccctcctttcttccttccctcccattttcttatctcctttttccttttcttccctttttcctttcctttccttttttctttccttcctctcctgtcttcccttcctttccttccctccttccttcctccctttcttccttcttccttccctctcccccacctttcttccttctctctgtctttctttcttcagaccctgatcactgagatataatcactgcgtatgtattttttcacagagtggaccttaagtacccatgtctcaccaacctgagcccacaagttctaccaaatctgaaataagacaaatttctgctcttactactgcaggcactctgaatttttcttctgctctgaatggagctttatgcttgaacagttatgttctctgtctctcttttgaagaattttttttttttttttgagacggagtctcgctctgttgcccaggctggagtgcagtggcgtgatcttggctcactgcaaactccgcttcccgggttcacgccattctcctgcctcagcctcccgagtagctgggactacaggcgcccaccaccacgcccggctaatttttttgtatttttagtagagacggggtttcaccgtgttagccaggatggtctcgatctcctgacctcatgatccacccacctcggcctcccaaagtgctgggattacaagcatgagccaccgcgcccggccaggatatcttattagtacagccaccccaccttctcatataaagcatcattaactcaggctcttgttagtttccttcatattacttctcaattaatatttatttatttgcttctgtggttattgcctatttcatccatttgaatttaactttcaagcgggcagggatcttttctgtttttgtaccatttttcccagcacctaacactgtgtggcacacaatgggagttcaataaatcatctgttaatgaagtgattattataattattgatgtaactttatgcagggcttcttggtgagctgacccacttagtgagatggcctcgttcataagtcatgcctgatattctgtgggatgattgtaagttgtaaatcacaggagagttttcagcggggcagggtttttggaacacggtattagttactggtggcctccagtagaggtgggtgtaaccctaggaaacaaccattattcaaaggcagttttctgaaatcaaaatgcattggataccattctcagcactcacaatggtgggaccagcaaaggggatctgggaagggcagcaacaattcttatcaccatccattcagctgaatcaataatgtgattctaagagcaatattctttaacatatgttccttaatccaatatcttcagggtacttttgagtatgagaacttatgaaagctttaactaaaccagattgataggcataacataaaaagaaattagtttctgacctctaatagtaaaattgagcttagttttatttcatttgataataatttcacaacccatttggaggaaagattcctgttcgttagttaataaattaactctgaaggcctgaaagtgtacccaagaatgctcagatattcttcagaagtgatttttctgttggaaacttagaataggatacttggaacactctagtttggctaatggcaagggacccacttctttgatgaagtcattcagatctggatagtgtcaccatgaaaaaaaatgattcctccaattttttactataaggaaacctatccattggacataatgttctcttcttttgaaggaacataattaaaatagtggaaaagaaactgccacttcagagttgtttaaaaatgatttaacactttaatttctgtgtaaaatgtctatgcttaaaaaaaaaaaaataaggccagggtgagtgatgcaactctgttgctttggagtcggtgagatgagagatttgcctttcatctatttgggagcaaaagatgagctgccaaaattaaacaatttttaatttgtactaaatataagaaaagtctatattaacacatgttaaatataagaaaagtaacttttatttctcttttggtagacaaatttttatcaagcacatctactgttttgattaaatgtatctgaaaactctcaagttataggtgccacaggagaaaaaaatgacaaaataatattgttgcaaatacattatgtaattttagaagatcagaatcctataccttcagaagtaggaagtaaatgtcaagcagcatagtcattctactaacctcctggtatagtacttcctattggtgggttaaactttcttctagagtagcaaattgttatgccttttgttctgaagacctctttatactcctgaagaatgtaaaacacaaaaaatacaccagcaacacattccaatatcagccctagtgatgatatcatcacatgttgtcacctctgagaagtccagcatacacttgaaagaggatgaaaataaaaagacaaataatgccttagtattactcagaaaataagttatgttcccacagacccattgaaagagctacaggtattctagtgccatattcattttataaagaaaatctaagggattgactagaagatgggaattgacagttgttcaatattacattcttttgcactcagtataacaatattgtaattattacagaagaagctgaggtgcattagttggcaaataatctaaacataatttaacacattgttatattaaatgtattcatttgcctaatcccaatcctcatatattatatatttttcttgcttaattatttcttaatatgtttatagtaaagcaaacaatttaatcaaagtccacttacttaaattaaaaaaaaatctattacgctctttgaatacctaatttatatttttaatatgaaatgtggattctgagcaatctgtttaaatacatactatttaaagccctaaattaaaacatacatactacattgagtacatatctgcttgtactatcaggataactttctgtaaggtgcgacttttcaaatgtttactgtactaatcatacaattaaatggttgcaatttagtagttcttgtaaagaatttgcattctaaataataatctaatgactcatatatgtgtttctagccttaaagactcctttttacaagacaaattggaaaaagacaataaatttcctatcaagatttgtatctccagatggtctagataattacagaaaaattcagagacattttgaaatgtctttttcttaaggagaagagacagatttaatttaggactaggactgaaagtctgaattcagacaatactcatccttagccagtatgttactcagcaaatccaggtgatatgaaagaaagggaaattcatttggcagagagttcaaaggatatttatttaagccacaccaaaaaaaaaaaaaaaaagtaataaatagtttctaatgaaacttgtcatgaaaagaaagttccaacaaaagtgtgaacaaatatattcctttaagtcctagtcacagattgttacagtttaaatctgagtcacaaccaggtatagaagatgataatttggaggtccaacaattacctacttttaaggttttggggatttttttttttttttagataaaaccaatatctattttagaaattatctaaaagactctaaggctttgatacatctttcctgagtatatcactttgagtttatagaatatttaatgtagctgaatctttaatgaaatgcgacacaattattttgaaaaaaatttgacacgtattactcccgtattaaatatgtaatggacgtcagttaagatctagctagaatcatattgtttttagaatttacaaatctccttgtcataccttttcattgagactcacattttcactgaaatgtaggtattaaggccatcgaccctattttaggttttaggagactcaggctaaggaaaaaagagtgactttctgtgggtcctagagagataggactcaggtcttctgagtcttaatataatatttttccatcacaccatagctttgtctagattgagtgaccaacataccgttctttctagtttccttatccccttaggaaataagagattaaaccttgtttaacttcattagtagccttatcaaaacctataacctaagaagtcaaaaaaagactatctcaccatctctcccctgaatatctcttgtttcttcactagtgagtaaaatacattgtttcagcaaatcgttttgccataactagacaccaaaatttaaaactgagaaaagaaaacgtgatagaaaagtaagatggcatatcttcacattacaagaaaataagtaaataaaaataaatctgccagagtgactccttgataataggataataggagaaacagtttcagccaggagactacgcccttccgttatgccatactttcctggctgaattaagagtatctctcatcccccagtgagaacctgtctgagctagcttaagatttttatcattcaagaaaattccatttggaagtgagactctctagataacttggagacacccataataaattatcgtacgtgcagataaccttccaagatagtatttagtgctcagacagactgcttttatcagtttaagctatatgaaattgccattgttttggggtcaaaccagttcgataatttcatatggtgcatctcagacttcacttgtataagaaagcaagatactttcattaagagtatgagctttagagtctaaagatctttatttatatggaagcacttgctcatactaatcagggaaggttaattaactctcaaatggacatgattataattgaggtagggcctatagagttgctatgaggattaactgaaactacaaatacagagtctagcacagtatggtatcagattgctattcaataaataatggatattatagggctaatattgttgctgaggtcctgtattctaactgtgaaccctatctagctgttgcacccagaaagacttgctatttacttctgataaacttggactgcacctcattttttagcatattactgtcatggttagccatacagtctctttcataaatggttttctgaggtcatctatatgagtgaacccagttagtgctaataatagaatttggccatgaagcctgtacctgttaatgccaagaaatctctgtgatttggaggatagagcatctttagcacttggatatatttacacacaagtttttgagtcattcagagatttcacttttaattcatatgtggagaatgttttagtatttataataaaatcaggtacaaaatataatatgtattacttccaatatttcactgctatttactcttggctccaggcaatcaagaatctttaatttgttactctgttttctcagatattctttttaaactattcctttgaactcataaggagctattacttctctcagccattagccttttcacacttttgctctttctgaccactgtgtgccagagattgcaaattctttgaggtcaggctttgtattgtttacctttgcatgtgactagcacatacacttgcacattacaagaaccccaacaatatattataagtagaaccaattggaaaattcaaatgataagcagataattgcaaaaatgtgtttgcaaaattatagttggaaattggaacacttgaaaatttttttttaatttttttttttattttaatagtgagccacatattggagatgatttaaggcttgcagaccgaccatgactgccaattgacccacactgtagctgaaataatactaccagaaaaaaattctaccactgagtcccaatgacacttcaatccccctatttgatgttagactcgcttgcctctaaggcatgatctttttgatgtgtggggatatagagtgttgcttgggttgctgagaataaagtttgcaatggccaaggagacctggttataccaagggaagatttctgcaaaaggaaaattcttcaagtttcgatgtccacgtttgcatttataaggggctgaacaagatggtagccactagctacataagctacataagggtatgtacattaaaatttcaattaattaaaaagccatttcctcagccatactaaacatatttccagtacttaatagtcccatgaagatgacacctacaaaattggatagcagatattttcatctcagaatgtcttattggacagcactagtccaaacaattgatggagaagatcatttgggtgtagagaggcaggttgtaatttataactcattatcagggagggtgagtatagggctgtcacgatatcagaaatgccttggcaattctcagctgtttgatgcattaacacacttcttccacctggaaatggaattccagctctttctactgagacacacacacacacacacacacttttttttaacaagcaaacacagatctttttttctaaattgaatgattatcattaaaataattattcctcgtgtattttttctttacattctctctgtaatatcttgctgatcagattatagaatttccattacataaaaagtatttttgtcgttttatcaatcaaccaaccaaaaaacgaaactaaaacaaaattacaaaacaaaattcagacctttaggtgatgtttttattttaaaaggctgtccaatctaggaaatattgcataactaacttattattgtcttggcttctcaagatgcaagtacaaattttgactttaagcaaattccctctgctgttattagcatgatcactatgaataaaaatatatcacaatttaaaataccaaaatatgaaaaatagaaagtttgccatcaaaaacaaagatccaatattgattttattttttcagggaaaatatttctggaggtttaagtctttactactgacacatttgaaaatcaagacaatggaaaacccctacccttttattgagctcatatttttcatctgtatatggaacttttcaagtaagaagatattgtgtcctatgagtgaccttagtgttcgggtaaattactttctttctatgaagagtctaaaacatgcatataaataggaatgtgcataagcttgcaaagatattactggcgttctgcattttccataaaaagttatgtatgcctgaggctaaatgcctagctgtatttcatcctaaggttaatagaacttcatgaaatatttagactttcataatatggcttttacataatttttcaagacagtcagaactttttgaccatttaaatgtttttacctaaaacagagcaatcacctggcgtttggtttacaacatgaattctttgtccagacctctctttggagtggctgcttcggtcttgttcctggttgattagacatagatctctctgatctgacctcagataacatctatgcttagaactctcgtctctcaaatgttgtgctttgatcatcaatcatctttgaaaatattaatatagcaatgcccaactcaactcagctgacaattcagtcgtccgggacacaataaaaacaaatcaacacataactggaccaaaagctgagtacccagtttgtttttgatggtggtagtggtgatgcttaaatacacgtgtgtgtatatgtctgtgtatattttatcacatgcatacacacacacacacacacacatggatttaactggatatcacatatcttaaaaattcagttagttctagcatttctcccatctaagccaactaaataagatttttgtaactattaccacttactgctagaaaatttcctttagtttaaattatctagacattaaaaagagggaggaaatattttattttactacaaaataattctccagccttcaagtagtattaaagcaaaaacatattataatattgaatttctaagggatgctatgaattttttggtcttatctaaacccatcacaaatccctttttaaacaatggtcaacatttgaatgaactgggccattgcagaaactcagcatcttacgaagcatttccttccttctttttctcttctcttcttcccttcttttctctttcatagattaaataattagaatttaggacctattaccttttttttttcattaagaatcgatctcagagctacacctatttgttaattctaaatcattgttttctggagctaaacagatctagtgacttttcatgtaactattcttaaaatatacatatgtataatatacacatatataattatacttctataggtatatttctattatattacatttacatatgtatgaatatacttttatatatacacataaacacacacacacacaaacatacgtatttttttcctctcctctaaatatcactccccaccccagatgattaattcaaaaaataatcaataccaatctgacattgtaccatgtgccaccagagacaatgagttccctgtgtttgaatagtaaacaatattgaacaaacattaaattctgaacaatgttggaccctaggaggctcaagcttcacattagggttttaagtagattatcatcatatttcatttaaatcctaactttccataattgtgaaataatcaagttagagaatttttccacttccccaataactagagatacatttacaaaattactctcagttatcaaagcatttacttaacaggctatttccaagggatacatgaaataatctatgcaaagcatgtaacacatttcttgatatatagtaagtgctataatttttatcaattactcttgtgttattatacataaactaaactctaagcagtagagctctattacactttccaatttatttttgtatctgaaatacatgttaacgtgatttctggctattgtgttttttcttgactggttaaaatgggaaatgaatagaaatgctgtcatctcacagtagtgagaaaatcatcccaattttaatgatatacagcagatgaatcacctacttaatggcatgatcaaacagacctggaaataccagtcactcccattgcagcccacagatttatctgtttatggatggaaataatgcaaacattcttcttgaaaccactctattaccacaaaatatcattattgactagacagtataatccttctcaatatgtgtgccttggcttgtatagtagagaaaataatataaaatttaataagtagtaatattaaatcaaaggagcagaaacagaaattcatttcatggttttatctggttaatattaagcactggcatggtctttataaaattaggctatttctttaatttatatcctttagttataattttaaaagatgtaaaccattaatttacattttagaaacattctatttgacactgtatattaacttgcattcatgtgaataacattaaattggatatgaaatagcagtctttaaggaaatagtgttttaaatacataaaagtaggtaataaaatgcaaagtaacagccaatatatatagagaacttactatacgtgaggcaatgtgcctagcattttgcacagattatttcaaatttctcccaaaatatccctgtaaggtaaagggttgtttatgctgacagtaacaagttgtctatttattttggggtatcatacttttttttttttttttttgagacggagtctctctctgtcgcccaggctggagtgcagtggcgcgatctcggctcactgcaagctccgcctcccgggttcatgccattctcctgcctcagcctcctgagtagctgggactacaggcgcctgccaccacgcccggctaatctttttttttttttgtatatttagtagagacggggtttcaccaagttagccaggatgatctcgatctcctgacctcgtgatctgcccgcctcggcctcccaaagtgctgggattacaggcgtgagccaccgcgcccagccagggtatcatactcttaactgataatcttacaatgatggaaaataggatgtaaacaaaatataaatgtcatctacttaaaatcctacgatgaggcctgcactgtctgtgcactgctcctactaagcactgttccaatgtagcattcaggcatggggactcattgcctctggatatggcccactctatctctaaatagttctagccgttagacaactggggccaacccaagagagataaattttggagcaatttcgggtagtgttttctattttctagagataggacagaaacaaattagaaaaaatatcgggaaacatgcactgtgtcctgcctcactatccaagacttctttttaaccagacgaatcttcccagtcctttaaaattgttctgcatctgatctatgtcagctctcatcagcattctagcagtgctcttgtgagtcaactctggattacctacctctctttctcttaaagaccaatactgagaagagcccagttgtcagctacacagactttcaatttgactgcctaatatcttgttctctctctctcttaactcttgtgagtgtagcaactttcttaaacttctctgttcctcatctataaaggaaagattgtaatagcgtccccttctggacttgctgtgaggtttcaatgaaataatctgtgtaaagtttctagcacagtttttagcacgtaaagaatactcagctaatgctttgtattattagtgttattaatatgacaactgtaatcagtttcaagacttgatctactcataatatgatggcaatttacaataattcttctaatgtgtttaaaatggagttcgtttttgacaacaatgtaagaggggtgattaaaattatgtatgtgtgtatatatatatatacagtgtatatacacactgtgtgtgtatatatatatactgtgtttatacacacacatatatacatatatgagcatatgcatatataatacatatgtaaatacataatttacccacaaacacccaaaacactagtagttaaaaaaccattttcaaatatatcactaagtatttctaccttacctaggtctagatttcaaatagagttagaaattaacttatgcagttgataaacatttattgaagaaatgaattgtaaagtaatacgcttctccagtcagaaagtttttctcatgctgtatattcaatcaaattgacaagtgaccttgattttacttcctcagtctcttgaattaattccttcctttatttcgtcataactgttgtgagctcaacttttatatctaacatgtaatctaggaaaacctgaaaatcagtgtctctgctcctttctcctcaatttacgtccaggacattccatgctactagaataatttttcttaaatgtcagttggatgatttatcacccacttgtcaagaacacgcaaggattcactattgccggctagttaccctcaatctggccttcctcagacagttcaacttacctttccagggtcaatctctcctatttttttaaatgtatacctcaatcactagaccacatgtcctccttgctactctttaaagacaatgttcattttgcactgcatttgtatttgttcacgtaggctagcattttgctcccacctcatcttcattttttgcaactcttccaagtctcatctcaacaccacttcatccataaagtctctctgatcctcccattcagcacaacctcctgagacatgaaattccaatgaactttgtttgaactattttagggcccttatcttacacaatcgtgtatcctagttattcttgcacttatgttattaaacatagatagagggttctgtttttcctagtagcccctcacaatatttagccaagtttctcaaaaatcacatgagctcaagaaatgtctgttaagctggaggtttgatggatcctacaataggcactcatattacatttttgaaatttatatttttagagaaaatagatcttactgtttttctctattataaagatagactgagataaacaaatactttagaaaagaaactttgaagaaataacaaaaaagccctctgagtgtaaatctattttgtaaatgattttgaaacgtcttactttttatatcttattgacatatcaaaatattcaaaacaccatttacctcagttgctttaacacagttccacgaagtataataaaaagaaaactaacaatagaaaagaaaagcaaaattactgtcctggttggtactactttacttgaagatccagtgaagtttcacccaggatttttttcaagttttgtgagtttcaccaaccacataatcatagcttaaaacacataataaacataaactaatacaaggaactagttgggggattcttgggacctgcacacagaaaattcccatgttagaattaggccaactgactggagatctggctacaatggatggctatttactgctcattcagtaatcttcagctggccttcgaagtaaggactaacttgtcttttcagggctgggaagaaaagagagaaattgtggttttgttaagtgctgcaggaaatatccggtcttttctcttcctccactgtttagaaaagagcatgtattggccaggcacggtggctcatgcctgtcagtaatcccagcactttgggaggccgaggcgggctgatcacgaggtcaggagatcgagaccatcctggctaacacagtgaaaccctgtctctacaaaaatacaaaaaattagccaggcgtggtgccgggtgcctgtagtcccagctactcgggaggctgaggcaggagaatggcgtggaacctgggaggcggagcttacagtgagccaagatcgcgccaccgcactccggcctgggggacagagtgagacttcatctcaaaaaaaaaaaaaaagtcccagagagatactcttcccctcccactatgtgaggaatagcaagaaggtattgtctatgaaacagaaagcagatcctcaccagacactgaatctgccaatgccttaatctgagacctcctagccttcagaacagtgagaaatacatttctgttactcgtaagctatccagtttgtggtattttttttatagcagtctaaatgaactaagacattatgcttttaaatgatttagatatttatggtaggattcctataattgcatatcttgacgttgcatttcctgaattactgtgtataatataaaaatcagagtaccacactcatctaccagccaagctgggcttgtctgacttattctttggtccctcacctccttcttgatttggggggacattcttctatgcaattccgggtttttcctgtaaccaggtcttagttttaatttggtccactctgactgctatgctatccggtgcttgatttcaatgaataaattctaagaaaggtagatgcatattcataattcttttaagtaaatgtgtaaaatataacttttgattttcaggttgaactaaaagatgtaaaatttaaaaggacagaaatggcacaaatgcatgtagcaaaatatctgagcctcctaaaacaaaaccaaataaaaatatgtattctctaaaattttgcatatttctctgacttccttatcctctactccagtggtgtaaaatttcacttagcacctgttggagtgctcttggcactaaaatatcacaactattgccaaagtcatttcttattttctagagcagaaccaatcagacatttctaaagctgcctcccttcaaacttcattatgacctccttagctctctaggtggggtttatctttcctctctggaggtaaattctctcaccttagctaactcaggcaactacaccccctatgtcagctttttctggttttgctgttaatataggaggtaattatctgatacggtttgtgtccccacccaaatctcatcttaaattgaggctcccataattcccacgtgttgcgagagggacctagtgggagacaactgaatcatggagggggttttctccatactattgtcttggtagtaagtaaatctcatgcaatctgatggttatataaggggtttctgtttttgcttctctctcattctctcttgcaggcgccatgtaagaagtgcctttcagcttccatcatgattgtgaggcctccccagctacatggaactgagtccattaaatctatttttttttcccagtctcgggcctgtctttatcagtagcatgaaaatggactaatacattatccttgacccaaagttttatcacattcctcttccaaaattttatgagtaacactccccttttctgttatcactacatccataatcctgacacaagaataacagatttgccattatttgaaatcatatgagaaatgtttaatgtttttgaaccgtgcgtagaaagaacagctgtcaacattgaatacatacatccacaatgtgaacagagtactcaatctgtattggggtataggcttaaaaaagtaagaggaaatcctgggccctgctcttgaaatccaaagctttgaattaaggtgataggaaatgtataccaatgcaaactgaatgctgatgttatatggttgcttcttgtagtagtgagagtagtttcaaaactgggagctgctatcataagcattatgataatatgggaaaccaactatacaagaatccaaaatatgaagtcatatactcaggggtgtcaaggaccacagattaatgagaaaataattcataggggaagttggccttagcagaggtatttatacatggttgaggtaagaaggtttggtgctgaagggctcctgtccatggcagggttactattccacccctaaggcagcttgggctttccatctaccctgcctgggttaatgcaacctgaaaagtccaaaaattagaagcagagccgggtgagatcttgatgtagatggcgaaaaagtaagtttttaatgtttgaagcttagaatatggctggaagtagaaaggaaactgaaggaagctagtagtgaaaaagtgaagtagactattgacaaagtaataactaggaatttttgtttcatttgttgaagctttttgtattatactgtgcctgatatgatcaaaatatttgaaggaagacttctagatcttgtgagttgacactgtttatgctgtcattaagaatatctattccaacatgcaggttaagataaaagaagaaagtagcttggactattttagagtttcttcaagaatgagaaaagtacgccgggcgcggtggctcatacctgtaatcccagcactttgggaggccgaggcgggcagatcacgaggtcagcagatcgagaccatcctggctaacatggtgaaaccccgtctctactaaaaaaaatacaaaaaaaaaattagccgggcgtcgtggcaggcgcctgtagtcccagctacttgggaggctgaggcaggagaatggcgtaaacccgggaggcggagcttgcagtgagccgagatcacgccactgcactccagcctgggcgacagagcgagactccgtctcaaaaaaaaaaaaaaaaaaaaaaaaaatgagaaaagtaacggtgaagtctcagttccatataaagggtgctgaaacaccagaaatacacataggtgagttgtgggaagtagaaaaaatacaatcaaagaaaattcctgaagggtatttttggggggagtggtggtaataataagatattttgatgtatttttctagcatccacaaagtcagttttactctccttaaattctttaaattctccttttattctccttaatttgacccttctgtacgtgtgagtctaatcctgacaaatcaactcacatgaaaccaattcacagagtctctggctgaatggaggctttaaccaataacaactttcctacctctcgagttgaacacatgcctcactcattccataaaggaccctctgtatgacaggcactgctttaggcacttgggatatgtgaatgcacgagtatacaaagctaaaaaacaaacacacacgcagaaaaaccaaagccaccttgacttcacaaagtttgtgtgctagtgaggggtggccacaataaactacaaacaagaaagttaaattatatagcaacttagaaaatgataaatactgtggaaaaatagaaatagcaaaggagattgggtgcaagggctggagagagggttggaatttcaaatggtgtggtcccaataggtcttatagaagtgatctttaagtaaaacttagcacattttatggactgccaaatatattgtagctgcatggaatacatagtgaagaaaatagtctgagactccactgtttaaatcttagcacaggggtgggggagcagtcaataacagtaaagaattatgtaacgtatcaggtaatgggaatgttaagaggatagtgatcggaatgaggtgctctgtctggtaatgtggactgtgaggctttttataaggcggtgtttgagcaacagaacctaattcatataatttctcagtatgggacccatagaaattagatactccagcaattcatatgttctaacccttcattggggaaagcaatcccaaggaagggggttgaagatgaatcgatgtaagggaggaaaggagagcaaggtaataaaaatggttgtctctgatctggctgccactctgatctgtaagaaaacagcagggtctaaatcttttaggaagattttctaagatgctggcattcctgggctctccattgggaaagaaggggaaagcacttatgtgctggtcaagggtctcctttgtgaaagttgcactctacagggtgttcacttcccagcacttctgggctgctcttgtccaggttctaagctggtccctggtgtatcaagccttagctgcaccagagaagctcttgggtagaagataagagaggatcacatggagcataggcatgatgtaactcactgtgcgttgtgcgcatgtgaagttgagaggtaaacttgcaagctccatggcctcaaaggtggctgagtggcctgtggtgcaaaggtccgcaggtgaatgaagcttagcagacctgatacagtgcacaagacgaaaagtgctttatagatattaactaatttaatgccaataacaatcctatgctgtaaatgctattttcatccctatttaacagaaaaataatctaaaacataaagatctttaataacttacctggagtcacacaactagtgggtgtcaagattcaaacaggcctttcgcctccagaaacatgctccttaaccttgtgagtaccaatcttactccacaagctaaattgtttttaattaatggtgaaaaaattctcttaaatcttttaatagttttctgtaaattatgatttctagtattgcttcatttatcacagaatcagttcattttaactaaattctaaagtaatgatatttaatagtcgtagaaagaatcactgagaaagcagcaagaagtggaagaggaaaaagtgcataaatagtacctagaagggagcctatttttattttatttgatatatattttgacaggaaagaggacttttacctaaatacattttctggtatgttatttctgctccatcagatgaagaaaattgaattaaaaattttgaattacttcagtgggttatcttgatgtaaccgttaaaattgtctatttcagtctgcatgttaaagtaaaagaaggacatagtatacaaggggtttgaatatcttttgtatattatgaacaatttgaactccatttgctttgagtgtttcagttccaagcaccagttatctgaggaatgataggcagaacagacttaaattcaacacgtcagtatgaaattctgcagccctggtagagaggatgaaagaacaattggtaataggttctgttatcttctcagtccctgttctgtttggggatattatccatttaagtgaagtcattccaaagcactgagaacaaaatgtctctaatttcactcattttgagagatatttgattaacattttacctatgcatgtatatcacacagacacacacacacacacacacagcccttcacaattgtgcatagaacttagggtttctctcccaatattagtctagtctgcatagccagcaatgttcttctcttgaggaggattgtaaaaggatattttaaaagtgctttttctaatggagaagtgaatcagacaaagtaatcgtaaacaagacatgccatttttcttgatgaaatatctgtgacagtcctcgtttaactggtctctttgattcagtcttgatgtggtttgtcctcttgtttgcactcagcactttgtgcaaagagaaatcagcaccttttcaaaatcaacaagaaaagtggtagttacaatattttggccttcatttttactgttgattaaatgtgattgtagtttctttcctactgaagaacacctaaattctgtctcccaaataaaacagagaagggtgcatctttctgtgcaatgtcacttttggaccaatgaacattaattatgctgtttatttcatccagaaaaaccggagataaaatgtcatccaaagtcttttgatttcttatcccatagaacccatgctttatcagaacagacatgtagctgacaagggcaatttttaaaataagttttaattagaaactttcctgaagttctacatttatttctgctttaaaaattactagctaatgtcaaagatgctgaacttttatctagccacttcaatcgaaaaggttggtatcaagaaaaatactgattttagtcaatgaacaatgttcacacaatgtaataatagagaaaaagtgatacttggggaaaataaaaattagtttacttcttgtccttttgttcataaaacagtataattaaactcagtaagttacaagtagcataattaagaactacatgagagccataaaaatacttgcagattcattcaaaagttctaaccactgaattctgtattattttttgggtcatagcagtttcttaagattttcagattcaagttgaagcaatgactaatatcttctcatgaacatactgacgtcagttactcttgccatatcccctagaagagtcgtcacgttgggtagattctattggataaataactcacagtgctatccttctttcatctgtgacactcccctcatataactaatgaccatttatccttatcttttgtctcattatctcctaatagattatctatcctccacaatattaccaaggttgatttatttgcaaacagatttgttgatttcagtggctcactatcacctacaggagaagccagaatgcctacaaggctccctccataccttaaccttccccatgactacctggtatctggcaacacacacatactccgtatttcctgaacaccccatgcccttgatctgtgccttagctcttgctctcccttttgttgggaatacgctccccctgctctttctgcctccccacatttttgtccttcattgtatacacgattggcctctgaatgttttctggtctccctaaagaatcggtcgtgtacatctatgtgcttctgtagaacatgctctacttctctgtggtgtgtgggtcatgtagactacttgaggttgtcagtgactcattcattcactcagctcctaattaacaacaactcactttgtgccaggcactctacttcatgctgtgtatgcagccggtgaatacgtcaaacacaatctctccattatcaaggacaagtggatctcaatctcagcatccatactgaccacttggagcactttgcaaaaaatgcagattcctgagctacaccccccagatattttgacccagaagcttagagtataatgcaacaatgtgcttgttgttaacacttctagaggatgatgatcgatttggctcacttacatgatgtgagagacaatgcagtacagtttgtaccctactaggcaaaagagataactttcaacttccattctattttattcttctaattttgtaaactttatactcacagcaagcaggctagtgcttggtactttttatgtgctcagtaaatattttcgaatggatgtatgactctctcgtagaatttacaatctagtgaagaacatggaagattacaaaggcacttctaatactacatgccatggttcaggaatgatggtgctggcctagaagaggatatctaattatggtttttcagttagaaagtcttctcaggagaaaagatagggcaactgctacccaaaggataagtatgttaccagataaaatagttgatgtgtaagaatgccaggcaaaaagaagtgcctgctcagtatgtggagagcatgacctactgacagtgaaaatacagttataataaatgtgtgccaaatgcacaaataatctgtgtattgttggactatgtgttagatatcccacgcaatagctggcaaacgggaggtgctaaataactacttattaaatgaataaacactgttctgtcataatcactacattttaaatgagattgtaattgctattttctaaaacaaataagcacaaaaaagcacatatttcttcattttctctcaatgtgtcctcatgcatatttgaatgcctccaagaccagtttttctacaaaggaatgtttacaattaaaaaaataacactttagttcttaacttatttttgacattttatggcaaaaacaagttttctggttatcagctctccagagaattccattttaattgtaatatattgtttatagtaaaatacatttggaattattttttatgaattagttaattaaagatatatgatctagttgagatgacagtatttttttcctttcatgtactatcaggaacttctaataactactttcagtcaaatatagttatttaaatcctgtcattatatacaatcactaagttacaaaattgtaaattcaaagcctctcttctagaactgccaggcattctactaggcagaataaacgttaacagtgattttctttcataagtcaattcctatgctgctgcccagcaatgcaaaacacttacttcctctagtggctaatcatgttgcctacaaaagaagaatttctttttcttctgggcttttagatattatctaagaaaaacagtgcatttttaaaattggttctcttcttaattaaaaaaaagctttgaaatcagtagaagattttataaaagtataaaagagaagctgctattgttatttttaagagtaaaataaagtactacagcctatcatgagtgtaaaattcatgagtcaaatctgtttcagttgtacacagtccttgacacatagtaggcacatataatgtatctccctagttagaggtttctatagagtggggttttgaatatttattaaaattgtggggctaagggggcaattattttaccagattcaatcataataacagaatgtgatactaagatacgaatgacaaatagctcacaataatccagttaagaattctgaaaaatacagctgtgtgtatcagaattaataaaataccaaaatgacatttcgaaaatgaggaaagcatgaatttttcaataagtggaatggtgaaaattaagtatacacttgggaggacatgacaggaaagatatatccctatttcacaacttttacacaaaataaattccaattggattaaagatctaaacataaaactgaaaccatatgcaaacttacatggcttatttaatatgataccaaagactgaactgagaaaggattgtagttcaacagatttaaatgtttaaaaatgtttgcttatcaaaccatatcaaatcaagtaagaaagcaaaagacaagaataggaaaaattttgcattgtgtacaaatagtcaatatctttaatataaataactcccttttatgaattatttaggaaagtgcaagtaatccactaaggtggttaaagaaactgaactagtaaatcacaggaagaaataaaaaatcagtatggctaagcatcttagtactttgcattatgtttatgaattatattacaatgaggtcactaaagattaaaacaggggacattttccattgttattaagactgaggacaaaggagtactcaagggtaacaagttaatgaaagaacaaattgtctcaatttttaagttaatgagagaataaattgtttcaattttcaagttaatgagggaataaattgtttcaatagtcttcaatcatacaatactgcagtcagtaaaataatatctatttttagaacattgacagagaacaatgtcttggacatattttaagacaaaacccttgaacaaggtaggtttgaactgcacagctccacttatacatggatttttttttcacctctgccacccttgatacagcaagatcaactactccattttctgcctcctcctcagcctactcaatatgaagttgatgaggatgaagacctttatgataatccacttccacttaatgaatagtaaatatattttctcctcgtgattttttcaacaacatttttctcttagcttactttaatgtaagaatacaatataaaatacacgcagcatacaaaatatatgttaatcaactgtttatgttaccaataggcttctagtcaacagtagactattagtagttaggtttttggggagtcaaaacttatacatgaatttttgaccatatggggtttggtattcctaatcctcatgttgttcaagggcaaagcatgtaaggcatctatatagttactatagctattgtcttagttcattttgtgcttcccagacagaatttcacaaactgggaaatttaagagaaatgtatatcttcgcagtgttctggaggctgggaagtccaagacacaggtgccagcaggttcatttatctgatgatgatctggtctctgcttccaagatggcaccttgaatgctgtgtcttttgaaaatgggggaatgttatatcctcacatggcagaagacaggagggcaaaaagcgaaaaggggcaaactcctttcattaaacccttttataatggaattaactgacttatgagcaaagagccctcttgaactaagcacttcccaaaagatcctatctcccaacactgttgcattagggattgtttccaacacatgaatttcgggggactaattttgaccatagcattccaaccctggctccccaaattgatgtttttttcaaatacaaaacacagctattccatctcaatagcccaaaaagccattctgatgccaacttaaaaatctgaagtctggagtcttatctaaataagttatgggtgaggctcaatgcatggttcatcctgaggcaaatttccctttagctgtgagcctgtgacatcaaacaagttacgtgattctaaaattcaatggtggtacaaacacaggactgatatttccattctgaaagggagagataagcaagaagaagtaacaagtcccaattaagtccaatacccaacagggcaaacaatcttgaaacttaaggccttggagtaatctatgttgactccatgtcctgctgcttgcacacgctaaggtgagcgttgggtcttctatgctcccagcagctctgtttccgtggttttgctaggcacaacccatgcttcagcacttatgcattgaagccacatggcagtgacttctagctggtatcgcatgcaggtggctctacagttctggggtcttggaggcagccctaccccatggctccactaagcattgacctagtggggttctctgtggcagctcaacctctgcacaggtctctgcccagacctcgaggctgtctgcaatgacctctgaaatttaggagaaggaagccgtacctccactgattttgtagtctgcaaacctgcagaattagcagtacgtgcatgctgctaaggctcatcactgtgccctccggagtggcagcctgagttgcacctgcattcactggagccatagctggggtggctgaggagagctgcaccagaatgcagagagcagagatctgaggcagcctggacaagtgagttctcctgcacaggatctctgaaatgcctttcagatcattctctcattgtcttgatgaatagcacctggcttcctcctagccatactaatctccttattacaatgtatctcggccacatccttggttttctgtcctcaacatgccttttaaatactttacccaaccaggctgtgaattttttaaatctttacttcctgctactcttttgattataaattctatctttaagttgttattctttttccattttactataggcagttaagagaagcaatgcagaattgtgactattttgctgcttagagatttcttctgcccaatatcctaattcatttctcttaaattttgccttccacaaaattttaggacatagacataattcagccaagttctttgccattttataacaaggatggcctttccttcagttttcaacacctcattcctcatttccatctgagacctcatcagaatggcttttactacccatatttctatcaaaatttagttcacaacgacttaagtaatccctaagaagaatgagggtggaagccttctgagctaaacagctcctaaaaggccacaccttccaacactgttgcattggggattaagtttctaacgagtgaattttgggggacacagattatagcaattatttagatatcttgataatttatatataaccataaccatataggtgataggagatagtagaaatatatagtataaggtctttcatattcagccatgcacataaacaccacacacacacacacacacacacacacacgtccacatacatgttcataaatatttaggtatacagatagtttgcatcctttcctgctctcaccagcctgggtcaaaaatgttatcatcaatttctttcatgataagtgccaagtccccaatgtttctgatcattttgccttgccattagctcaagtatactcccaaattcttcagcagtgactcctttgtggtgaaatcctgtggctgtatttggtgcagattacctttgttaggcaattgtgttgtgagacagagctctctcttttaccactgccattcataactttgccaaaggtttgagagaggacattctttccctaatacctcccagcaaaactgagcacaggttattgagataaacactgctaaagctcagccatagagtacatgtaatagcaagagtgactactctttactactatttactttagaaaaggttgctactgtagaggtcatgaacaaaacagaagaacattgacgccttacctaaccacaagagtccttcatgtggtcggtagtttcactctctgtcaggtggaattagcaggtattaccacacatggaaatctaggcccaagtgctttctcagccccagaaaaagacaaaatccttctgttcctctttcagaaccaggctggctaacaatgggttatctcttccctgcaggtgaaatcttgttcctcatacaaaggccaattcttcctcatggtttcaaaaataacaacaacaaaaagatcataatattattattcagtcttaggcagtactaatgtgggacaatatgtgtccatgaaagactgaactgtaccacatccaatactatttcttttctatagttgtatttatatggagtgtgggggggtgaataaatatgttaagcatatttacttttttgctgcacccatcaactcatcatttacattagatatttctcctaaaggtatttttatctactgactgctatctcctcttcactattgattttcttgaccaaagtttcaactaaaataagtttaaaagaaaaaaataagattatacttattaaaataagtttaaaagaagatttgggaaaatagtagaatattttttcagttcttcagagtaatgattctgttaactataagtcaatttatgttgcaaacacaacactaaacgtcacagcttgtactatgtgtgctttaattacatcaaaacactgttaatttccaagtataagaatgttattcttattatataaaataaaaacacataaggaaagttaaattccaatctagaatgaacctaattactcatgtgacaaaatatttcacaattttacaagtgtattttttgatattttatataacttttcaatcctataccacttcaagaagctaaaccatatgacccatatgagatttgactcaagtgatattctagcagtaggtgcctagaaaggggttttcctccaaacatgagcttacttggcatgaatggctgttctagtgtacatgacaaaaattagtggcgtgaggggcttacttggcataagtggctgttctagtgtacatgacaaaaattagtgggactcgcaccttcatttctgagttaagtcatggggtaggaatgctgagagaataaagaggtttcaggtagcaggtgtaggcagagaaggcctgaggcatgggtgaatttttgcccacttaaatggcactagaagtggctgaaatagaattagacccatagaaactagaatgagagaggaatacaaaggataacagagcaaagacttgtttggaatgaagaaatgagagctagtgggatggtagatgtcccatcgggtgccagtataaggacaaatgacaccttagatgtccatctcactcacacctgaacactatgtgcccacagtttagttgcaaaccagaggcaagcggtcatgggaccttaaattaactcaaattgtttttttagtcatccaacataagggaggttaaatgagatattgtgtaactatataagctaaaaagatgtaagcctaagacttggcatatactttaattgtagaagatgactactgcttcagataaaaaattaaatccatttatttatccctatagtaaaaataattaaaatgacagaaaaaaatatacaaatgattaaatatatgtactcatacatatacacacaagtgaataaacacacacacatatatataaatccatagtaatgagtatctgtatgctgttagaagtgatccaagataatgaaaagcctaattatggaagagagagaacagacattgcaagagtaaagttcttgactaggcgtggtggctcacgcctgtaatcccagcactttgggaggccgaggcaggaggatcacgaggtcgggagatcaagaccatcctggctaacacggtgaaaccccgtctctgctaaaaatagaaaagcaaaattagccaggtgtggtggcgggcacttgtagtcccagctactcgggaggctgaggcgggagaatggcgtgaacccgggaggcggagcttgcagtgagccgagatggcgccactgcactccagcctgggcgacagagcgagactccgtctcaaaaaaaaaaaaaaaaagaaaagaaagaaagctggaaaagttaatggaggagatggaaataaatgatagatagatgctaaggagaattttaaaagttaattacaagaaataaaatgtatttctcatgaactctttctggaaaatacttagaaataggagaaatccaaagaagaaggcagcatgggaagcaagacacaccagagccaacctgagtataatacaaataaatacctacatgatggcaatgaagtagactaaagaaaaagaaaccaattggattataaaattgaaagaagtatttagagtacccatgaacaataactccattaaaaagagatagacgaacacaatttgtatcaataagaattaataataatattaaggtgtatattttccattgctctttggaataaaagcaatggaaattaaaagccattagaggaaaacaatgctgaatacaaaagccacactccaaataaaaaggaagataaaacatagcatgcttttaagtagagatgaaatacaaaattacttcccaatcaataaagaaaaccttcactgctcaatcaatgcaggaggaaggaaagtgacaattgccattctgatttaatgtagtcactttaaaattataacatagtaataaaaataaatataataataatatagtaatttcccacaaatttttctcctagaagttatatgagatccctgtatgtgtttgttgggtggcatgtgtgggtggtggttggggagagtgggtacagatcaaagttacatataaatacttccctgttagtttgtcttggagaagcatcctgaaagtaaaatttagatttactcctagatagtttaatttaattttaaaatcacatacttttggtttttaaaagatcataaaataaatacaaaacaaaaaaacatatagttgcaacacaaactacaggtgaagaaagatttccctaaaaggcgcctagtcaacattgaagacctgaccaagagtggttctagaaatcaatttccattttaaaaaactgtggatcaaaagtgaagagacttttacattttttgattatatttcctgcttttggcaatttttatggagtgagttgcttttataatttcttaattttatgcattttacattttgtgaattgcacctgaaaagatcatttcccaagaagatattagctatttttggaaagggtacaatttttgaggataatggtatacagagggaaaattcacagaaatgtatacagaattgttaaagctataaaatgatggctcattttaaatttactagctgctatacttcaaactgagagtccggtatgaacaagacacaggcactggtatcagatacttgcaatctagattggcaggtttagaatgattttaacaaattctataatttggattatgtacaaatgtgattggtccctaaaagagagtgatgaattttatttttaatcttttctcaaagaagaaaaattacttacttggagaaaaattcaatgtggagtttaagattatatgagggtgtgttttttttttacagaatcagtgttgggggctggaaggaaaagtggagaaaagagattggtgagggaagtgttaaaaagatgaggcccatcatgctaagtgaaataagccaggcacagaaagacaagtcctgcatgacctcacttatatgcggaatccaaaaatgtcaaactcatagaagtggagagtagaatgatggttaccaggggctgggggtaagggaaatggggagatgttgctcaaagggtacaaaggtttagttatgcagaatgaataaatactggatctttcatgtacagtatggtgactatagttattaacacctcattatataatttgctaaaggtacatcttacatgttctcaccgcatacacacacaaaatggtaactacctgaggtgatagatatattaattagttgattacggtaatcatttcacaatgcatatgtttttaaaacatcatattgtacatcttaaatgaatacactttttatttttcatttataactgaataaatttgaaaaaagatagcgaaatgatcataaggtagaaatagacaaatagagggcactggcaaacacaatcaggatgttacattagctccagtagtctttagaagtagaccagacactctttccagaaataatttaaattcaacacagaaagaaggactggagtggttatgatgtatagattggaatgtttctgccacttgatctgcagaaaatggcaagtgtggtttttccctgttggtggcacagggaaaaataggcttgatgtttatgattctttatatggggagggaaagctgagagaggagtgtcattaggctgacactatttctgtccactcagaagcttttgcccaggtactgacaataatcatgtgactctcagtagtttggtcataaaggattggctactactggttgagtagaattacccaaatagcactataatctcaacagcattagcataatactctaataggataccgtatttattagaatataaaataaacataaatatcaatagaaatattttattttatgaaccccggctagttgcaaaacacattctaataaatgctatacaaactatcgccaaaattcctgagtttagcatgcttacagaatgaatataggggatcttctaaatggtatgcacggaaagtgtatgctattatttgattttcaaaactaaaaatcaatatgctccatatactgtgccctaaaagcaacaatataaacaaaacttaaagatgcgtattttgggaatgcaggtctttgggttggaaaacagcaatgatggaacactaatgcattcaaatcaggtgtcctatattttattcccttaggaatgaaaacattgtaatgctgtgatacacattctgatcttaaggaaactactttggaaaaaaagagaaataaactgttaatttatttgtggtattatttagcctatttctaaaaaatagtaagagattccaaaaacatttaaagtagtaaattgaataatcagtgagatagagctggtaatgagaatagtaagaataaccacatacaaggatcaacataacagggaagtgttccacttagaagtgaagataatttgttttaatgtctttatttggatttatgtctcttaagttttcaatatttgaattttttttacaaatgtaaacaaagggaagaaatgtgccacagatatacatacatatatatatgtatatatatataaaactaatcattagaagcacacaatatctgctttgacttgcactgctctggatatctctatacatacatatatatataatttataatgtggagatatatatatcatattgcttcacaaattatttttacttaaatatggtcttagatttaaaaaaaatgtgaaatttgaagagtaacatgttttagctgtgcatgacggcacgtgcctgtatccccagctacttgggaagttgagacagaaggatcgctcgagtctagaaaccagaggctgcagtgagctatgatcatgccattgcactccagtctcggcaatagagcaagaccctgtctctaataaaataaataaataaataacaataacaataaaataaaataaaaatatatgttttactagtcaatagtatttggaaaatacaataacacaattttttgacgtattataagtttgacaaatctaaattgattttttctaaaacattcaagggccttaacaataataaatacatcccttttcattatttatgaaccggatcacttttattgttctttattgttttacagaaaatttttcccccaagagatgaaagcagtttatagatgtttagcccataatttgctatttgaggtttcaaattgtcagtggtcaattatgttttgtagactacaaggcatttatttatttattatttattatttactctttattctcctgactcatgttgatgagactgtagcaatattaacttcacagaagctttattttacatttggctatgtacactgcagtctctggattttagccaaatatcatagaatggagggaagccatcatataacaggtgctactgctatgctaggagatttttgtgctaaattattaaatgaaaagcttactagaaagtccagagtagaccaacataaaagtgataattcttaaattcattatctgtaattttgccttaaataattattaacaatatttttcacaatgactgcttcttcaaaagaaaaactaaaatgacttgacattctgcacattaaatatataattttgaatattgtcttcaatcaattgttcagatttgtagatatagtttgcaacagacaagataaggcatgtaactatttttcattaacgactatcttgccaaatattaatgctcaaatcttattcatcgttccttacatttctgtgtttaaatcactaaatccattcatgttttattgcaagatctatagttgtctttggcacattttcttcaatcttggttttttccaaagtctgagaaaccatctggaaaactagaaaacccacagacttgtggggactttctggtttatgtaattcggaatgtccacagtgaaaagttttaagtcaactttctgagtcaaaattgcaactctttgccaatttttattttttattatttgcaagccaactctccattatatagtgttcatttcaataacatagatggattagagtaattgacatagtatataagttatatcataaatatgtacatgaaataaattattgacataataaattgtgtgatttttatttcttcatagataaatgctaggcaatcaaaaattccattagatttttctaacgtgtcaaaattgaatttataatttttctacacacccgattgcttactcctatattggaaaatatattttatcctaaaaagaatgtttcacttttaccttttattttcttcctctctaaacctaatcattaggtagatcctatcaggtccacattcaaacactcctttccttcctcttatactttgcaagccatcataccttaccagtttcattttctcccggtcactttgcctcccaacatccaaacaccttcagtgttgatcaggagacagacttctcagtgactaaaactttgtccatagcccagtatatatagttgagcagaatgttttgatgcaggctacggcactaaaagcaacacacagactacattcagacagattggttcactttttctagcatcaatctccaaataaacaccatcaggtcttttttttttttttttttgtcataattgattattaaccttgtatttgtctttgatttacataaggaatttttggaaacatgtgtccttatgtcccagtcctgggtattataaatctgttattccggggtgggcccagaattgaatgtttctagttaaacaccatgaatttccttgtttctttgtatacaaaatggtcttccttttatcaccaaatatgtgataccgtgtgtaaaatgctaaacattgtaatttctattaagtctcctattataaatctcctcttcccctaacttggaaagcacctcttggtcctctgaaattctaccttacttgatagagagtgaatatctcacatggactgcatttatgcaccaaatgccttatctccttttttcactgcactttctttttctctaaatacaagctctggcttcttctatctttggattgcctaaagtcccttacagtttgaagatgctaaatatttattgtgtgggataaatttatctcgcaaagagcaatgtgttgatggcaaaaatttctccagctgaggtaaacaatatgtcttagactaaattttgatcaatttccacattttgattaagtaataaatagtgtgtccattaatgcctgacaatgcttatacttcagccagagtgtcagcattttaccaactagaatattagacggttatccttcttggagagggctatggcatttcaatgaagtagagtctcctctctgtatgatcctccccatctttccgcacctcccccgacatacctagaaaacactgtagaaaataactgtctttgctactgactgatctgaaagcaaaaaagattcaaggaccaatactggggaataattagattttgttcaggtacgaaaagatgattccataagaaaagatgattccacgtggtacattgccaactgaaaggaaacctggcacactggtcaggggattcagcttgtgtatcacatctttctagaacttaatgattttttttaattagaatcatgaggtaactataagatctcagtccctgagttttcagcttctcaaggtgaaccccaaaaattatagtcctcattgactataagactatgctaaggaaaattgtttatttctaaacactgcaaatgtattactacttctcaatcatgatatctccctacttcttcccagagggacctttctatcttattttggccatttctaacatctctgccccctgcctttggatcatagaatatttggggaagacttttctccattgactgtgattctccactgattgtggagaaatgctcctttttcccatgtaactctgcatttggaaaagctatattttaaaataactgtattatttttacaattattattattttttccactgtcaaacagtttactaagaagtcaattgatggtgtgagggaaaagtttaaacaaacatcctagggaattaaacaaacatccttatagaaagtcttggaagtagatgatatgggggtaaaattgagcacccgctacccataacttgggctgtatcatgtagcttgaagtacaggaaaagctactgccaagctatacctgaacctaatctggtagttctgtagttctgaagaatatttgctaattcaacaggagaaatttatggaatattaatataacctcattcaaaccctctaagtatacctatatgttttatttctgtatttagatataaaataaataaaatattaaaacagtctaccccaaacaaaaaaccctctatctgaattttggtagttaacatcttattcccaaggatatcattcacatttttaaaaatctgggttatatcatacagtctctgttttgatgatgtatatttaaatataactatcgatagtttacttatagatagaatacatacttccttaaatattatcttaaagaatagattacaattacataattttaattcatttggaacagacattaaaacctctcagcaaaaagcaaaaatgattgtgcccattgtcttcatgatagtcttttaaggtctacttatacaatcaaataatccccagaaaacaaatacattgaacactcaggacatgcacactctttcaggacaaccacggcagattttctgaaactgcttagcataattatgctaccaaaaagtaagcaattcactttaactttttgaggggaggcaaagggataacattgttatgaactgaatgtttgcgcccctccccaaattcctacactgaaatcctaacccttcatggtttgaaaaagaatgcattttaaaattcaaatcagtgttgaatacatttaaaggtatacagtttgctcttatgcaggctttaccccataagttttgattatatacatttttatttgataaaagaaagtccactaaatcaaccaatatttattaaatcacattgtatctatataaaatgcctggtgttttgtactagagctaaaagtgtcagcaaactagatatgttctttatactgatggaatttatgcacaagtcggggaaccagacaataaacataaataattataattgtaaattttgaaaagagcgttaatataaacaaaaaagaatactgcgtgttagggaatgttaagtatgtagtagtttattttagccaggatcattaggaaagattctttgaggaaatgtcattaagtgaatatctaaaaagaaagtagtcaaataataagctcactgtactagttgtgctttcctgtacttgtttaaccatttacctgaatgaaagattagaaatggcgtgacttgggactaccaaggaaatggctatcagagaatggaaggtatgaggacttgtaaaatgctcgaaaataaaacaaattataagtttcctggaaacctgttccaaggcaattgagatgtaacacggatctggaaggaatccatatctagaataatttgaatacactggtaaatacattacgatatcaaaaagatgccccaaatcactttctgaatgcttttaaaagcatggatttctcaaaagagtagttatcaaacttgaacaagtatagaattacagacagagcttattaaaatgtatatttctgggtcctactgccagtgttactgattcagtaggtccaaacattccacaaatgcagattttatcagagcctttaagggcaaacagttgagaaaaagggcatttgtgtcaactttgttgattcagcaagtgattaagtacagttctgctgtcccacagtgttgccattggttggagttcctacatctttagaatgtgttgtcctcctccaggcagtggtgcccccaaatccatttacagacaaaaaaccagcccttattgcaagcacacgtactttctcttcctttctctcaattaaattggaattaagcaacatttaataagctggtaattttcagtgaaggaatacacagcctatggtttggtacatgaacggggaacagagtaggattaatttaaagagaacagtgagtttggcactctgatggtgggctttggcatcctcatctttctcgttgtcacttatactccatcaatgacaaaactaatgtggtttttgttgctcccttgagccaggagctgtgtcttactaaagaggaccctagctttctctgctggctcagcagttcacttcctagattatttttcccacagggacataaccactagtttgtcaccagaacgtctctggacctgtctcagactgggattaacataaaggagtggaactgtacaaaagagagaaagagataaaggaggctcctcctctcctcagctcccgggcctgtctccccttctgcctttccacctttttccttaccctttccagattcccagattctgggattatgaatagaagcttctagctcctgtttaactccttagttacccaccctcatttgcccttctccaggatctctcttctactttttccattgtgccttgtacctccctctgctcctcaccaacaccacctctctctagctcctgagctcaaccatcttctgaactaggaagaaggacatgaggggttgtatatcaggatgaaaccacattgaaccctggggaggaagacaggggcatctctgggctgagactgccatctccttaccactgtcctttctccacatgaaacattagggtgggcattctgttggtggatagctcaaccttcagtgctcagttgtacttttttattaagctataatatctatttttttcttttttttgtaaatatataaatattgagtttcattaaaatagataaccccctcaaaaaaacacactgcaaagaaccaccgtgtgtgtgtgtgtgtgtgtgtgtgtgtgtgagtgaacttcattgtcattagtaggaaaacttatttttccattcacacaatgtacccagaccaaaacttcgatttaaaagtttgtacacataaaaaataagggaagtttgcttacctatgcatttaaattggcaagctgaattgagcaatgaactgtgatttaaaaagagcagagagtgcgctgatgtttattttcattggaagaagactatcagattccacattttaatacatgttctctaatcagttactgttttcacatatattttccttaatcagctatatagtatcacctggttcccattctgctaactatgcctttaaatatgtcacagctgtgttagaattgccaatgaaaaattacacttactgtttaacttgctttccagtctgatatatgccatggctgaagtagattacaagtattttggaagacagccttcatgctcgacttcttgaccagatatgtgccctattttattttccgatgtttatcacaagctttctattttatgtactctaatgacatatttagtagctgactgattgccagatgagagcaacactagcatcactgaaaaaaaaatatagccaaatgactttaactgggttcatatgaatttcaacaggataaatggacattcatttaacagctcttccagtttatactgttgaaatgctttaaaggcactctctcccacaggaggacactcctaaattcctgctacaagcctatgtctggcaagatacactggtagtaatctttataacagactttaaaaaatacattcaaattaaatgctcataaatattacatgggaaatcattctgctttaatccttccaatgagtgacactcaggttttgctaaaaataagaaggaatttgcatttttgaccaccctgattaggacagaatagacatataaaatctctctgttggatgaatatacaatgtttttttggctctttccaaccagggagggaacaagagagaacaggttgaattttatagggaaaagtatgtgcaatcatctaaaccactattgcatatgttccatgatattacacatgcttaaatggtccctatttaaaaagcagagaagaataagaagtaagtaaataaataattttaaaatggcttttgaagagtgcttcagttatatttcattcactgtttgtataaaagacatgttttccctttcttttctaatgttattttttggcaaaaataccctgtgttgaattacttcctttatctacagaaaagaaacaacatgtgtctgggtgagagacggaatctttatttcttgatgctatatattgtttttacattgccatatgttttatttatctttctgtaaataggctatatttggtgataaaagaaaagctgtattttactccttctctaaaagcaagctactctctttttttcctaataactaagcaagacaaatctcaagcttccattactaagactctgattatttcatcaatataaattgcaggatgaactatgtaaatatgcattttgatgctgaatttactatacatctacttaaatctttttgattcctttttttatgtgtcaatataaagtttatttaccaactcaagttttgaaatcactaagctatttatcatgtttgaacactgtgtgtatgtgtgtttgtgcacacacacacacctatgaacaatcaatagcactgcatttctcgctatttatatgtttataattttataaatttgattgggcagtttgcttttttcaatcaacattgatctatccttctacttattagtaatgtaacatacatacatgcatatggttcacgcattttaactatagtagcttattatcttatacattgggtcttattttcaagctgtgtgctggtaaatatttatggaaattttcctatggtgcacatcaagaatcagaattctgagcatttgcaggtgggtgcaggtagcctcagctactctggatgctgaggcaggaggatcacttgagccccgaagttcaaggctgtagtgtgccatgatcacacccgtgaatggcctttccattccagcctggtcaacacggcaagaccgcttctcaattcaaaaaagagagtcatttgaactaaacattgctgactggctgtcccatgtgtttggacagatttgcattcccactacctgtttccaagttcttttttctcccacctcctctccacttgtgatattaacagatggcagcaattttacataataaagaagtaaagcagatcaatatactataatgacttgggaatatgcccagaacatactttattttggagaaaaaaaaaagagcaaacgtcaaattggaaggtttagtatgacctaattttggttgaaatatacaataagcatgtgtaataacaaattacaggatttcagctgatgcatatcaaatagcttgaatcatttataatcattatctcagcagcatgaacttgaagtataagaataaaaaactaatcttttacttgtgatactttgtattactcaaagtcattataaccagcaagaaatacttagtaattataaagtaattaattgttgtcagttaaaaaaataaagagaacagaaagagcattctaatatccttgcacataaaatatttcaaggggtagctctgttatttcaaaaataatcatgcttctaagacagtagtgagagtcatgatgtgcaaccatacaagttgtgtgctacacaattctagggacatcactatacaggttactctttaaatggcacctcctagagttgtacagtgtataaccagacaagtggtaggtaatagtgctgttaagagatacttcaatgaacagcgaagattctagaatgtctaagaaattatttttcttgctacagatcaaaatggtaaaataacagtcttggaacctgaaattcttagatgccagctctttcctcagattggatgaaaagcagggacagtagtcttgaaaaaattaggtcaccacatggcattcagatgctcagttgggtaccctcaggtttgtatcctggctgtctattcactggtgactcaactctaaggccctggatctctgggcagctactgtctgctaatatgttacagttaaggttttacatcaggttctatagagaattaaatgcaaactacatgtagctgtcacaaagtttttgctgtgtagataggctattggccaggctgttgtgcccagagaggcatctgcacttagatttcctatagagttgacaggtattttcagatatgcctcatttaaaaaaacaactaaattttgactgaaaaattgtgtcttctgtttgggatttaataactactctgttaatggaagccacctaatgaaatagtagcattagtttcaaagcaaagattaagacacatgaatgtaaagtattaacaggcatagaatatattttttaacataaaaaatactgtttctgtctgaaataaccaacattctttctttgtctttaaaggtggtcatgcagaatttttgacacaggttgtcttattagtattggcttctaagaattcttcattcactataaaagcttaagaagaacatattaaaattgataattggccaggcatgggggctcacacctgtaataccagcaattcaggagtctgaggcaggcagatcactttaggccaggagcttgagaccagcctggccagcatggcgaaaccccatctctactaaaaactacaaaaattagctggtggcatatgcctgtagtcccagctgctcgggaggctgaggtaggagaattgcttgaatgtggaaggcggagtctgcagtgagctgagatagcaccactgcactccaacctgggcaacagaatgagacactgtcaaaaaaaaaaaaaaaaagaaagaaagaagaaagaaggaaagaaaagaaagaaagagggaaaggaaagaaaagaaagaaagagggaaagaaagaaagaaagaaaaagaaagaaagaaagaaagaaagaaagaaagaaagaaagaaagaaagaaagagaaagagagaaagaaaggaagaaagaaaaagagagaaagaaaggaaggaaggaagggataattatggaatttgctttgataaatatatatgcatgtcatattaatcttgaacatcatagctcttggtactttttggaccctgagtgattttgccaatacaatcctaaaacatataatgatatgccatgtattttgattttaatttaaatatttttaacactggccttaattttagcaggaacaatcagtaaatatttaactatagctattaacgcatacatatacttagtcataatacatatggattttataaagggagaagaaagaaaacacataaaactatgcctttgttatatcaattttctttgcataattaaaacttaatgctatttaccagcctcatactgatcacaggtggctgaaaatttcttcatatcaaatttattctattaataatatatagtatgtgacagttttctagggaaagctgttaccaaaaaggtagaaaatgaaacttactttaaagttaacttattaaataatcagttcaaaatctaaaagatgcaagaatttccagcaatatagccatcatcattgtcattgtttcaatggtaatgggagcataatatcagagtgtgtatataaattgaatgtagtgtgtatatgtgtatatattcaaaacacgataatcagtttcactacttacacaattttttctaagtttaaaagttgttcaaaataaagtttaaatatatctactatatttatacatttattatgcttgctaataattagtaaatactgaaccactgccctgtgcatgaatacacattcacctgacatttgagagaattcttttgcaaagtttactaaggaaaaacaatttagctagccttgattgatagaagtagaagtagactttttatagtagaatgcatgatgaaaggaagaatggtatttgatagtgagaaaaaagaaggtggactaagagtgatatagaacctaatcttatcaaaaaatagggagttggtcttaaatttgacatcaaggggatttgagatgatgtagagaggaagtcaaagccactcatgtgacattaggtgataaaacgtgggaaaaggaaatgctgtccttcgagtcatgcaaataatttttgaatggttcattacattggctttcacccctcccaaacgagtctctgttactgccccaccctatctgatcttgccattactatctgttggtaattttccacagcactagattccaaaacatacacatatgtctgcatttgacacccttagaattctcccagcaaaggcacattcccatgcaaagtaaatcaaaagaaattaaaagaaagcttagccaattcctcacacaacctgttgcttggtttttgttagacctgcccagataatcctcaggtcttgggaagaaggagagttgctcattttcatggatagaatacttgcagtttgtgcatatggcatgtttctccatgattaagaatggttacattcatttggaaaaagggatcctgaagtgcaccacagttcacttttcttcctgattgctctcagcttgtgtgctgggtagtagtccaattttccttcatttagtttaattaatcttcctataacaccaatataaatggttctctgttaaagtctcaacagtggtgcgacaatgtgtttcctgctttgcagttgtaattcacttaaaaccgagagaaatatttatattataaatgagatttctgatgtattatcctcatcttttaagaaaagagattaaatcaattttagttgatttgatagttttattttcactgaatccctgaagctcatggctcattactaattaaattatattttgtagattaaattatatcatttcaatccaaattctacttcccttccccactatagaataaatgtatccaatgtagtataaagctgaattttattggttatttttttaatttagttagattaataatttaataaatttttctatttatgttgattaacacaatgtgttacaaaattctattttgctgacaatcaatagtgtacttctgaacatatttcttattattgctggaaatattaagtttcagaatgcttttcctgtggaaatttttttgttttgtgaggttttaattgctttcagaaatctttcagacattaaaaatgttgcaaattaagacaaattcttctctgatctaaaataatcctgatcacttcataacaaacatgtagaaagaaggtcattaactacactttacagagaatggaaaacagtttatattaacactttgtgtaaatcatcttagctgtgcctgtttttctgcaccattatttagtgcttactttattttttctgcattgcttaggccagaagatcccaaataatatcatgatttagagttaccttgggagattgtaaaatgcatgtttccaggcctactctcagaaattctaaatcagtagttccagtttatagtttggaaatctatcattttagtgatgactgtcaattattaaaatgcaatttgtagattacacatgaaggaatactaagaaggaaaaatatgtttttgagtatttctcagttagaaccattacatagatagattttctgttttctctccactagaatgtcaactccctggtcgaaaggaagatatttcattcatatttactattctattctcaaacactaggacctgatctattctaggtgctaaatacatcattgctgaataaataataatgtgaataataaataaaatgtgactgcgtctgttttctactttgcttttgacagttgctcagggtgaggtcttatttgtatccacttccatgaaacacaatgacatttgtagaaaactccacataactgttgcttggtttattatacctaacagcactacagttagtatccttgtgatactcctcttttcagtgaatgtgaacagaaaaaagaagaaagaggaatagcagatatttgtgatatttaaaacagatgcttttgtagtgaaattgtttaaggattcatgtgtggttctcattgaggaacagagtcccaaacttgtttttcttttgcatatacttcattcatagagttcatggaacagttcttagattttactttcagcacatccaccaccagggtcgggtatataattccttaggctcagtgcaaaataaaatgcagtgtccctaccatattaggggaagtcaatcttcatttcttacaggtgaaaagttccaaaggatcaaaacctccacataagatgtgcttggaacgtggagtgggggtgtggaagaatctcctgttaagttgcccaccaaatgcaccatggggcatgacatagctggggtagtgatggacctcactctgactcttcccaggcctactcccaagttcctcatagaggacaaagggcaaaagatacttccctttcaacataacctgacctagtgactgtcctggatggaggctggcagtggtggcagggtggggagggggagggatcatgggttccagaggatggagaacaaaggcagccaagaatgcattctaagcagtggcaaaaaatggaaccacataagagctgagactctaatccctcagtgcatgtttcatgatctcataggtctttacttacacaacacaaattcaaacataaagttattcagaatgtctcttctcaggtggtgaaatcaaaaaattaaactccaagcacaaggttctttggggcactgaccctgtgtgcctgccagtggccacaagtgtgtgaagcaggctttatctaccatcccgggggatggagttttcctactgtctttgttttgtgtttctataacagaatactcgagcctgcgtaatttaaaaagaaaatttatttagcttgtgattctggtggctggaaggttcaagatgggcagctgcatctggtaaggccatcaggctgcttcaactcatggtggaaaatggaagaggaaactcttagattctattataatctacattcaaatctgagaagtatttcatcttttgtttctgtcacaatccctccttaacattcctgtacactaagattttcatgtagtgttaatcaatgctaaaatatttctttctttcttttttttttttttgttctgagacagagtcttgctcttgtcgcccaggctagagtggaatggcatgatctctgctctctgcaacctctgcctcctggactcaagcgattctcttgcctcagcctcccgagtagctgggattgcagacatgtgccaccatgcctggctaatttttgtatgtttagtagagatggggtttcaccatgttggccaggctggtctcaaactcctgaccttgtgatccgcccgcctcggcctcccaaagtgctgaggttacaggtgtgagccactgcgcccggccactactaaaatatttcttcatgtcactcttgtgtaatagcaatcctactttttttttttgtaatcaaatcaattattccaaacataaggttcaggtagtacagcttcctatacttgggataatttggatgtcttttcttttcctagatccattgaaagttactagccatagaattactaagtaaaaagggccaagttatcattcccttatatactttatgctgctccctaactaaaaaagttttccaaggatagctatgggtttctactttatcttactaccaaaataaataaaataaatcaatggaattggggggaaaaaaagacaaaaaagtcaatggaaaaaagctgtttttttaaacaatcaatgaaaatgatgagcctttagcaagactgatgatgaaaaaagtcagaaaacacatactaccaatatcagaagtgaagtaaagaatatcactttgttgggacgcggtggctcacgcctgtaatccaagcactttgggaggccgatgtgggcggatcacgaggtcaggagatcgagatcatcctggttaacacggtgaaaccccgtctctactaaaaatacaaaaaaaaaaaaaaaattagccgggcgtcgtggcggacacctgtagtcccagctactcaggaggctgaggcaggagaatggcatgaacccgggaggcggagcttgcagtgagccgaaatcgcaccaccgcactccaatctgggcgacagagcaagactctgcctaaaaaaaaaaaaaaaaaaaaaaaaaaaaaaaaaaaaaaaaaaaaaaaaagaatatcactttagaccctgcagacattgaaagaataataaggaaatactgataataactttatacacaaaagtttggcaactaagataaaatggaccaatattctaaaagccacaaactgtcaaaaattacccaatataaagtagataatttgtacagccttaatacattttaagaaaatagaattcgtaatataaaaaacaataaagacatctccagacccatgtggtttcagtggagaattccactgataatttaaggaagaattaataccaatgctacacaatatgtttctgaaaatagaataggaagaaatatttccaaatttattttatgaaactagttttactctgatactgaaaccagacaaagagagaaaaacacaatacaaaacaaaacctaccgaccaatatcgctcataagtataatgcaaatatccttaccaaaatataagcaaattgatttaagcactatatttaaaaaatggtacactgtgaccaagtggcctttatttcatggatacaagagcagttcaatattcagaactcaatcaatgtttaattttaaaaagtcgtgctgtcttatatgaaaaagttatatgatgatgagtaatacaaccatagcacatgttaaagtaacagaaaacatggatgatacttagagacttgagaatgattgatagtatactatgtgtactaccatgtcaaagcagtcatcttcaccgtgcatatgctttcccatcttaaagaataagaatgtgatactctcatcacttttcaacagttaagccattttatatctttattaaattgtattctttagatagcatttgattttaacacgaggttgttttatatatatatggtcaaacaacatctattttatcaaactgcttgacaacatttagtaattcctgtactgtaaaataaacttttctattttaaacaggacttacacatcagaaaaagatgagaaaacttccactaaattcagggtgaagttgtatgtacttataatcctacgtactgtacattgtaacttagtttagcaatatttttctcatcacggtttttgtataataaattgaagataatcttcacccaagaggtgggtacaggattctcggcttcaacagaatcagtaagagtaactggctaattactgttttgtttacctgaaaacactcaacgcgtctggttttacactcctgtgtcaagatgtaataagatgcgttaaaaccagaagagtttaaatcaaccaagcaagacaaatatttaacatgaaaagcctgcataaaagatggtaaatctcactatatttctcattattttgatggaaatccacagtattacatacattgttgtttttatagaattttattaagaactaggactagaccaggcgcggtagctcatgcctgtaatcccaacactttgggaggccaaggcaagagatggagaccatcctggcctacacagtgaaaccccgtctctactaaaaaaaatacaaaaaattagccaggcgtggtgatgcgcacctgtagtcccagctactcaggaggctgaggcaggagattggcgtgaacccgaaaggcggaggttgctgtgagctgagatcgatcgcgccactgcactccagcctgggtgacagagtaagactccataatacacacacacacacacacacacacacacacacacacacacacaactaggaataggaatatgacaagattgtgttgtttttcacatgagagatttaaatcaaagtaatgaaagtattaagaaatgctttattttgtgtgtgtgacaatattcaggaaatacaacaaattttactaattaaaataactttgaagtatgaaagcaaattttgcaaacaatttgcatgcttctaaactgacgttttagggcattcttaataaatctaaataaagtttaactttaagaaaattttgatctaatgaaattggagtttctgaaattcttacgctttatattgatgtatcttctttgttgttactttaggttatgatgtgtcgattactgttgcaactgtgtatttattattttgagtaataaaagtacatgttttatctcagttgggcaaattgaacgtatattacttccttgaggtactaaaatgtgtaattacattttcaaaatgattttgaaagcatattagcatcttaatgtagaaatacttctaaatgcagaaacaggcattgaggcagcaatatatagctcacttgaaatacagaccagttaaactgaataggatagctacaaaaacacaaaaacaaacaacaactgatgtttaaataaagaatacctgtgtcatctcattaggtaagaagactttagagaaaactcagcagaggtgttatagcataaattacaggttttggtatcagaaccccactcttagaagtactacaaccttgcagaaattacctaacagctctaagttcaagtttcatcagttataaatttgtagcaaatacctcattgagttgttagaagacaaaacaaattaaagcattcaaagcatttgccattgccaagcattgagtagttgctccaaaggaaaacagtataaggaggtaagtataaaaaaaaattagggagcatatggctggccatactattcagagaaatctgtttgccttcttgctaatctagttggcacagaggtcagctaatttatttttcactcattagaactattaatacttttgttgctaactaacaaacagtatcccagctgggcatgatggcatgcacctgtattcccagctacttggaaggctgagacaggagggtcccttgaactcaggactttgaagccagcctaggcaacatagtgagatgcccatcttgaaaataatattttttaaaaaaacagaatccctatgggaatctatttcaagttaaaaaaggcgtaagttaaggaaaaagtgtaaaaaatatttattgaagttaagcattaaaacgctaagagcatactttaccatgccttgcaatgatgctgcagaacggactatagtgatatgacacatgggctataggtactctcatttattaaacataactttgtcatttgccaacacctgctaaagtctataccaaggagctgcttaagggggatcactttgaaagtatagaaaattgtattctttttatgtgttcttcatgaataaagcccccttgaattctgaaatcctttcattcctgtcagttagtgccaactctagtcagaaccacctacacccagaatcttagccagctatgcataacactttgcccttagccatcagaaaagatcaagcctctgaacaaatgagtgcaggacttaccttaagtgccagttattgaaacttggatgtaaaccaaaccccaaaaatgctagctatggattctgtgttttttttttaaaccaagaatgtatcatcttgatccaattattttccaaagggattctggggtgaaactcaggcagtaacatatttttctcccaaaataaacaaatagacttgacaccaagagagaaacgttgtaaatttaatcctttcccaaataagaaggcatgagttcagagggtatgattttctatccatcttgattgtgctgttttaaaaccagaaagtgatatcctgatttcccaaactaattttagatagttattgtaaacggatgatttgagctgtcattgtactatctgtggagtaattaacctatcagttcttgttctaacatacaatttgtatggactctgtattagcctgttcttacgctgctaataaagacatacccaagactgggcaatttataaaggaaagaggtttaatcgactaacacgtcctacatggccacaggcaagagagagcttgtgcaggggaactcccatttataaaaccatcagatctcaagagacgtattcactaccatgagaacagtatgggggaaccacccccatgattcagttatcttctggcaccacctttgacacacggtgattattacagttcaaagtgagacttgggtggggacacagccaaaccatatcagactccatatattttgaaatgtgaaaatataagctatacacacaagtaacaggtctaataacaactaccaaaggaacaatgactagacttacttctgaagctttttaaaaatttatttccatttgacatagtatacctaaatctcagaaattgtgccactgggaactaagtggcttaattccatgcattaatgtgaaataggtagtcaacagttggaagctggctggaagcaaaagtaggtgtgaagatttaagtaagtgtattttgctagaaggaaagaaagtgggaaagaagatgagattaggaactgaaaactggacttagcccagaaacaaaatagcagctggatgtcaccactttgaattttaggattttgcaagaaatataagcaatggctgccgaaattgggagcaccactaaaatattttaactaaagtggtccaaacccactaatgtcaaaataattcatttaatgcttacatatacaaaacataaggagtagatatattttagtgtaactgtttagggttgtatattttaatattgattttatgtatcctgtaaataaaatcaataaatagaaatggatcttgaaaaaatgcaatacttctttttaattaaagaatttgttgatgataaaaaatacacctgtcctattttttaaatttatttttaattgacatataaaattatgtgtgtttatcatgcataacataatgttttgaagtacatacacattgtagaatgattaaatgtagctagttaacaaatgcattacctgacgtagttattattaatatggtgagaacactctcttagcattttctaagaacacaatgcattatcattaattatagtcaccaagcggttcaatcacgtgtgagtcattttttcagacaaagtatgctgatatgaaaagccaatattaaaaatacattttaaaatgcttcataatggttttgttgtcgaatgggccaatgagtaaatgaccttccaaaatctatagaaaggaaattcctgattttcatcttgaaagaagtttttcaatgacaaatagaaatcaccattatcttactgaggaaggattatatgatgaagtgtcttctggtgtctattcaaggaaagtttggaaagcttctcaactgggatctgaaaatcctaacttgggatcaggtagacacagctttaatcaatactgttgtattattttgatatttcattttttgactatgttcttggatatgtgttttgtttcaccaaggacttctgcaatttatttttttattttttattttttattttttgctacagagtctcactgtcacccaggctggtatgtggtggcatgaaggcctctgcctcccggattcaagagattcttgtgtcttagcctaccaactagctgtgactacaggcatacaccaccaggcccagctaatttttatatttttagtagagacagggtttcacaatgttggccaggctgatctcaaactagcctcaaatgatccgcccgctttagcttcccaaagtgtgagccaccgtgcctggcctacaatttcttgacagcactgattcttctctatcttcctaggcctaccaagggccttttaggtgtgtgtttgaccctggctgttttctgatctcagaaacaaagatcacccaagagctttgagccacaggaagaagcataaccaaatatatttcagattatctaaatgtccattaaacactacactaatcttgggttattgtgtgaggtcttgaaacatgaggtcttaatcatgtccaaattagtaattgtatgatggaaaataatctgcaatctctttctcaaaattgttttctaaaaaaaaacactgagggcttttttattgtttgaaaaaggcagttatgaatcactaaacagaaattaaagcattttaaagattattattttaggaattttttacttgaaaagtactaaataaagacaagtagcatttaaacaaagaaaattatgtttaataattctgttgttgaaagctttattttaaaaaaattgtggctatatttttaagtatttttaatcaactccagtattgatataaagttggcacattcatttgtttgtgatgtactgtttttgctgttggtggtggtagtagtagtatttttagcagccttactctgaaatctggaatgagaaagacttgaacttttatgattgataatgaacaaaataattgattggtaaaacaactgttagtaatggcatttttttattgcagatcttctcttttagaattgggtataaagtgatatgctaaatgtcttttaattttacatacaagcaatcaaaggagaaatggcttggcgttcagatcagcatgtcagagataggtgaagttacactggtgtgttgggtgtttcctgatgaatatctctgaagacaatggagaaatgacacacatgagacatttccagcagacctgagttaactctacgcagctcagcaggactccattcatctgcctcacaacaccaccaaatcaccacaaaatatttatttaaattagaatacaatatattggattcttttgaaaaattcacaatattctaaattatattttagaaattatgcaatagataaatgagaacataattacaaaaataattttcaaattcattgcatttattgtaaactttcttcttccaagggtttgaatgaacaaagaaaatcactttgcctttataactaataaataaatgtaaaaactttaactttttgcaagctagataccaactgcagagaagatgagaccctgttttatgtaagtgttgttagtacctgttctcatatttttttctcttagaaacagagaataaaaagctaaaaacaaaggtctcattatattgtaataaaatggtactacataaatctgtgcttatcctgtcttcacatactgcaatccaagaggaaaatgaagcaagctgaaagccacaaggggaattccacacaaagataatgctacaactacatagtcatttagtatacacatgtatacacacacacacacacacacacacacacacacacacactccaaacatattcctagtcaatagacatagaaagggaataaatggtacattgcaaacagcattgatctgaaacctaacatatccagattgcttctgtcactacttattaccatggccttggtcattttttacttctccaagcctcggcttatgcatatggaagtgagaaatcagatttgtgggattttctgcattttttctggctgtgtaaaattgagccacctaataatgaccattaatagatgtcaaacatgctaccgggaaataattaggctccacagtcaagtgctactagggtgaacactagttaagatttgagggagttataattttttacaactgtataaaaattttaagaacagtaatgtgccgtaaaatactgagaaataacctactttagtagacatttttttagtgcttaaagagaaattttcaccttacaaaacctcaacagttgcaatggactgattgttttactctgttagttttgcttaaatattaattaaatattaaatattagaattttctctgagagcctgggaatcttgatgttagtgaagctgaccagtggaaacatgggtcatagtggggaatgaaaatggaatatcatagtgacttactttcctgtgcctatgtcagtttggaagcctccatttcaaaaatatatcagcttatgttgccaatgtttaggaaatatatcagttagttgggcatggtggttcacacctataatcccagctctttgggaggcagaaacaggacaatcccttgaatccaggagtttgagaacagactgggcatgatgacaagactctgtctctacaaaaaactttaaaaaaatttagctgggtggtgtggcacatacttgtagtcctagatactcaggaggctgaggcaggaggatcccttgatcccaagagttcgcggctacacggagctatgattgtgcccctgcgctccagcctgggtaacagagaaatagtaaaacacaaagatttaccagtgcatcccaccaacctgggggaggcaacaaggttatctttttacaataagggatacaatttggatttaagaaaacaattattgaaatcacttattaaaagaagactgcttgccacactgtttcttagtctgccataataaaataccatagattgtctggcttaaacaatagaaatttatttttatttgacatttctggaggctgggaagtccaagatcaaacactttctggtgagggttctcctcctgacttgcagatagctgccttcttgcagtgccttcaccaggtatagagagaaggagagcaacatatctggtgtcttttttcaaaaggactctaatccaatcagatcagtgccctgcccttgtgacctcttttaaccttaattacttccatacaccaaatacagtcacactgaggacagggttccaacttatgaattttgaaggggacataattcagtgcctaccatttcatccctggccctccaaaatttatgactttagtcagatgcaaaattagtgcattccactccaacagctaccaaaatcttaagtttttccagaatcgattctaaattccaacatctcttctaaatataatctacatcagatataagtgagacttgaaatacactttattcctgggcaaaacatctgctccagttgtgaacctatgaaatcagaaaagttatgtacacaatgatgagacatgcatgggaaagacatccccattccaaaagggagaaatataaaagaaggaagggagacaggtcccaatcaagtccaagacctatcaaggcaaatttcattagatgttaaggcacaagactcatcttatttgtcttgattttctgccttacaggcccactgggctgggaacatctgcctcacacctctgcagggcagccctgcctccaagatcctctgctaagtctccaccctctaaaactgaggaggatacagccttgagccatgtgcctgaggtgggagtggcagccctgaggctttctgaattgccttaggcactgattcttccctttttttttgaagaatacacactttcaaaatcaaatagacttatgggcctgttacagattcttcctgtagaacccaacaggctcaacatgcttgcttgcttcattccattctgctttctcccttagttcaaattggcaatgtctctgctaatataatcccatctctcttcttagattctgctgttgaaataattgattaaatctattcatgatctctttttcaaatggttgtttagccacaccattagtgtcctcttcaaagaaaactttctctcttcttattctttttttttttttttaatttgcaatatggttagactgagaattttccaaatctcagagttctggtttatttatgctaacaatttcttcttcgatttatctctgtcttttcacacttggtattagcagcagggaggacaaaagccactcattcaatactttgcttagaaatctcaccacaggttttctttccacaaaacaccacaactcaattcagctaagttctttgccactttataacaaaaattgttcttcctctagtttctaataacttgatactttatttcatctgtgatctcacccatatttctagtatgcacttcaacactcttccaatctctacccattatccatttccaacactactttcacatttttaggtactttttacaatagaatcccactgctggtaccaaaattattcttactcagcttgggcttccataataaactaccatatactgggcgacttaaacaacagaaatgtattttttttatcccacagctctggaggctgggaactccaagatcaaggtaccagtcaaatcagtttctactgaaggctctctttctggtttgcagatggctgtcttctcactgtgtcttcttatggcagagagaaagtgtcttttatcataaagacaataatcccattaggtcaggccccacccttaggacatctttaatattaattgcttccttactccaaagatagtcaaatggaagataggacttcaatttataaatgtagagaggacaccattcagtttatagaatcatgatctcttatttagctacatctccttgacttttaatctttagcttgatatataagcacaatataataactactctaccacttggagcaatgaattgctcaatctcacatgacactctgagaagcttatggtgtgaatttcagaacaatctgtctggggggaagaaaggagaatgcgttaatgtattgactttcttcccactctccttcccatgggtcttccatatggcagttcctggaaagtccctgtgagaagttgaaaatgagatgctgccaggttgtgtccatgtaaattggatagagcatgactggaacttagcatagcagtagctcaaatagaaggtgaatctgagagtctttgaactggtgaccaaaaaatgagtgattcaggctgttacaaatttaaaatggccacagatccttttacacccctcccactgaaagcaagtggtctatgttccttctttttgaatctgggaaattccataatggattatgggagaatggaggctgtgccaagtttcaggtttagtctttaaaagattgtcagtttctagtgggttctgtttgttggaatactagtttttgaaaaccagttatcaggctgtggaaagttcaagtgatgtgaagaaaccacatgtagacaatttggacattatttccagctaaactcccagccaaagcccacatcaactgccaggcaactgattgtgctatgctgggacatccaacccaattccagctgtcatctgatagcagctacacacaagaatccgtgagaatgcccatcagaggctactcaacccattagactgtgagagataaaaataaatcattgtcttgtgtcacaagataagggcataaaattgacatggtataaattattatattaaatactcaacagtaggagtttattgataatcaaagtggtttttactttacttattaacacttttatactattattgcagcttattttgagagaaatgtcagtgtattctgagctgtctttttatgttttgtttatatttgctttgatgcacatacatagtgaagttattagcacaaagatgtgttaattaaagataattaacatatctattatctcacatagttatccaatctattgaggacaaagtttttgtctaatttttaaattcatttttttatatcactattgcctgtcaccaatattggcacagattagacatttaaggtgaatatcttaaaaaaggtaaaagtttacgacaatgtaatagtatttgagaggaaaaacagaagaccagttagcgaggaggccgtgaaaaaatcaaaccctgactatccaatctttgtttataataaattggtgaatttttctcctaagatatgaactaatctctttgtaatttcctgatcgtaatcagtagttaaaaatctactctgtgaattacagattgttcagacaaacaattcaatttgcccacattttctctaggcatgactaaattagggggcattccgactgcaaaccagttttatccaaactacccataatgtgaccattgttttgctagtgactttaacaataagatgcattatacaaatattttaaaatttcagttatgcaacccattattattgctttcagctacatttacataacatgagtagggaactaggatataacccacaaaatgacctagggcattgagtgaatgttaaaatcatcaatgaatgttgtcctccaaactgattaagataatatttttgatgtttttaatattttcctgaataagtttttaaccactgtccctttatacatataagcatttctctattttgttaaatatttgtatttaattaaatatgtattttgttaccatatttttatttatgtttccaaaaggcacataaaaaattatcatattaattacatgtaatgttgctttttaatgatttattctgctcaatgaaatgaatatcatcttcataataaagtgttgcctaacattctattttagggactacagaaatggggaacatagcttccttttaaaatagaaaaaaggccacattttagaaagtgcattactaggacattaattatagtctatgaaagtttgtaatgctaatttcataataaagtctttcttcactgacattgacattcacattaatgatcattcttttatttactatgatagcgtaagggcactgtagaatccagtttaagtcacatacacatgtgcaaacacacacacacacacatacacactcaagagcgttctcagcaggcattgattatacaaaaagacatatgctctcacatctttctgtgttcctgatcctggaaagattgatcaaagaagatcctcttctactttaaaagccaaggtcctttccagatttccttccgctttctttccagtagttgtcagggccttagaaattgtaactcctctaagcattaatgccccgcacagtagcacctctgtaagacggcagatgctgctttgagagaaggtaccctaatgttacgccagagcctaatattgatagataaactctataattataaaataattatgtgaaagtggagtgttgctgaattttgcatgttgtattatttaataatgttttactatcattttgtcattcaagtaaaagtctcatttttccaggaatattttgctgctacattttcaccattgagaagcaaaacaaaaacaaaacaaaacaaaaaaacagcgaaacaatgctcatagttcttaagaaaagaaactttgtaggttagtatctaggcataattgagaattatgatcataatgaaacaactactagcctttcagaaaaggttaaaagctatacatgtttgagaaaaatacctttgctcattataatacctggtacatcatgttataattaagattgtgtcactctttccattataaatcactattttaaagactcataaagcagctgtaaaaatgagctccaggctcaacttggcatgtaaaatattaacccaagagaatttatgttttttatttttattttacttttgtacaaaactgtctttcaggccttcttaaaataaagcaaaatttcaagtagattttttctttcaggtgcctttttggcacttcataaatcaaaaccagtcttgcttgttaaaaaccaaatcttgcaagcacttggtgaattaggagaggtaatcattttgagtgcttcaaatgactcttttaaaagtgtcttaaatattttaaacattacatgtgatcactaaatatctgaagagttttataagccacctaccaggaaaatttttgcttctttcctttccagatggcattaaaaacattaatgatgccaaagtatagtgtaagacactttgctattattggtgtgattcactatttcagaatttagtttccataagacagctccctatggcaagccattccagcctaataatccccttgtgtaatattgtctacctgtgcccaccaagtgtgcacagtgcttcacttggctgatatgcacttgctacatacaccctgaaagttcaaccaattgcatatctagagtagaatttttacaatattctcaccattacaaagaatatactttgtcaccaatgcatatagactaaatataaatccagagttcatttggctgagcaagactcaactgcagaagcaattgaatagttaacatgtaaaaattatacactatatagagccaatagctaagacattctatatgtctagatgaggtcctttttaatatgagtttttttttcatctcaagtagaagtctaatcaactctgaaggtgagaaaactgattttttcagtgggttcttgtctgcattgatatctatctttcaaacctgaagagaaaatgcacaaagttggctgatattagatgtcaaaatcattttaagttaaataaatttgcttatggtttagatatttaaacacttgaatttaggtcattatctgtggtcattaacagaattccttttgttaagtgagtcttattgttcaggtccatggattatctatacttgttgcactcttcccaagcacaaaacgcttttctaaatgttttcgattatattctttcatttaattctcacagcaattgatatggttaggctttgtgttcacacccaaggctcatcttgaattgtaattcccaggtgttgagggagagacctggtgggaggtgattggctcatgggggcagtttccctcatgctgttcttatggtagtgacagaattctcacatgatctgatgggtttcattttttttttttttttttttttttttttgagatggagtctcgctctatcgccaaggctggagtacagtggtgtgatctcggctcactgcaagctctgcctcccaggttcacgccattctcctgcctcagcctgctgagtagctgggactacaggcgcccaccactgcgtccagctaattttttgtatttttagtagagatggggttttaccatgttagccaggatggtctcaatctcctgaccttgtgatccgcccgcctcggcctcccaaagtgctggcatttataaggggcactttcctcttcacttgtttcacacactccctcctgctgccttgtgaagaaagtgcctacttccccctcaccttccaccatgatggtaagtttcctgaggcctcctagccatgcttcctgttaagcctgcagaactgtgagtgaattaaacctcctttgtaagatacccagtctcaggtagtatctttatagcagtgtgagaacagactaatacagtaaattggtaccaggagtggggtactgctataaagatatctgaaaacatggtagcaactttgcaattgggtaacaggaagaggttggaacagtttgaagggatcagaagaagacaggaagatgtgggaaactttggaacttcctagagactcgttgaatggttttgaccaaagtgctgacagtgatatggacgatgaagttcaggctgaggtggtctcagatggagatgaggaactcactgggaactggagcaaaggtcactcttgctatgctttagcaaagaaactggcagcattttgcctctgttcaagagatctatggaactttgaacttgagagagatgatttgagacttgaacttgtatttaaagggaagcagagcctaaaagttcagaatatttgcagcctgacaatgcaatagaaaaaaagaaaaagcgtcattttctgaggggaatttcaagccagctgcagagatttgcaaaagtaatgaggacccaaatgttaattgactagacaatggggaaaatgcctccagggaatgtcagagatcttggcagcagcctttcatcacaggcccagaggcctaggaggaaaaaatagtttcataagctgggcccagggcactccctactctgcgcaacctcaagacttggtaccctatagcctagccatggattaaaggggccaacacactacaggcactattctagtatcattattctctgcatcaagcatctggaaaccctcctgcatagtcgatggcttgagcacaagaattttcaggaagttgctgcaggaatgctgcagcaacatgtctcaccagagtttgttacactgttggtacaagattcaggggcatcctttatatattttaactaaaacacattgcttgaaaactcttctaaaaccatcaataagaactatttaaattttctacctgtccatcagtaaagtattaatgtggatatgatggctgaggcttcatgcgtctcgggtttctgatataatactaattgatggtctttagatctaaattcctgagtagacaactgattactctagcatttcaatttaaattaataagcacagataaaatccctgtgtccacgccaatgtatttacaattgaagacctcacaaccaattagtatttgaggtggaatcccaaattacttagcttaggaattttatgctgaaggccatggagagctatgaaagagctttgctaaagttgtcacataatcagagtttccccttaaaaagatcactcaggttgcatgaaggcaacatgcaggaagattgcaagaatagatgataggaaactactatcatcagaaagcagcccaggcaaaagatggacatggataagtccattaaaagagatgtgttctacgcctcatcccactatagtttacttttaacactttctagtgccagtcatatagataaaaatgattaaacagtatttgggtcttcagaagaaatcagaattttttaaaggcaaaaatactctacctattttagatatatttcactaaagtacacacaaaaataaattatgcagaaataatttaaagttagagtaaacaacttgtggctctttaagaaactgtgactcagtggtaacagagagaaatagacaataagtataaaatcattaattaggccatagagctagaagggaaccttagggccagtctataccttcatgttttattaaattctaagtgctcagcccactattattttcagtaatagaaagtttggattttgattatttgtttactgtgtaactcctaggactcattaaaaaatctcagaaactttatcatgtttgaagtaaataaaagtgtattttcaatgactttattaaacttaggtatctaatttccattttctaccaaaaaatacagacatacgaaaatgaggggtacaacttcatgccacgcgttaccagcttaaaagcacttggaaagacttgctttacttatactgtctttatcatggaacaaaaacaaatgagtcagttatgtccctatcaacacactataaatctttgatgtctatacaatgccacattaaagtacaagaagctctactgtcagtgtctaactaccaaataaacttgacagtcaggaaatacagaaagcaaacttgggaaatacaacacagtcaatctgtatctgggatgatacagtgttttcatttggtaaaagataacatatggctcatgcagtctttgagggtgatgtcactgtgtatataccctgccaacatctctaatgttataaacttaggggccaagtaattgtactagagaagtaaggcaaataaatatgttgggttaaccaaagggaatgaaacataggtttagattttcctagttatgagttaacatgcttctccagaagataaggtagaaaaaaatatctgggtttagagtattgagtccaagacactgagaacacacaaggctcataatagtacagacgtgaaggaagagaagcaatgagttatcacagtcagtaaaatttatatgcagccaaatacagaacctgatgtgttttcctcctttctaggaggacagattacagccctggcaatgtagtcatctatacaagaaagaatagatgcaattaattctgtatgttcacaataagcatgagaacacatagatttaaacctataaataattcaaattgtaatttgttttagcaagaatatgtaacatttgggcaaccaaagctaatcagacagagaccgacgttgcccatacctggcgcaattcctccataactgtcattttggttttattttttccactccattttaaggatttccttgtaaattaaattttgatattgctttaaaatattaaagaaggaagacagtgagttagattaaccatcttgtatgcttcaacttcttgaccacctggaagtgattctgggatacatatttccccgaaggctcagtctaaaatacaaactcaaacattatctacacagaaaacatatattcgttaatgagaaggatagagaactcttctaattttcatttctgctactcagagacagttcaaacttgattaaccatgaggcaatataatactgtgcttgaagcaaagctgtgtttaaatcccagctctgtttttattggctgtttcagcttggacaagttaatgtccccatctttaaaatatgaggaatagtagtccttactttatagagatggttaaggattaagtgaactattatttaaaaggtttcaaatagtgtttggctcctagtaagtactatgtaagtatttattttaattttaaaaattgagagcatttcctctcagagagctattatgtattgtgatgattaattttgtgtgtcaacttagctagactattttgcccagttttttgatcaagtaccattgtagatgttgttgtgaaggcacttttaaagatgtgattagttctagatccttgaggaattgccacactgtcttccacaatgaactaatttacactcccaataacagtgtaaaagcattcctatttctccaaatcgtctccagcatctgttgtttcctgactttttaatgatcgccattctaactggcatgagatggtatctcattgcggttttcatttgcatttctctgatggccagtgatgatgagcattttttcacgtgtctcttggctgcataaatgtcgccttttgagaagtgtctgttcatatcctttgcccactttttgatggagttgtttgtttttttcttgtaaatttgtttaagttctttgtagattctggatattagccttttgtcagatgggtagattgtaaaaattttctcccattctgtaggttgcctgttcactctgaaggtagtttcttttgcgtgcagaagctctttagtttaattagaccccatttgtctattttggcttttgttgccattgcttttggtgttttagtcatgaagtctttgtccatacctatgtcctgaatggtattgcctaggttttcttcttgggtttttatggttctaggtcttacatttaagtttttaatccatcttgagttaatttttgtatacagtgtaaggaagggatccaggtctagctttctacaaatggctagaaagttttcccagcaccatttattaaatagggaatcctttccccattgcttttttttgtcaggtttgtcaaagatcagatggttgtagatgtgtagtgttatttctgaggcctctgttctgttccattggtctacatatctgttttggtaccagtaccatgctgttttggttattgtagccttgtagtatagtttgaagtcaggcagcatgatgcctccaacttcgttctttttgcttaggcttgtcttggctatgcaggctctttcttggttccatatgaactttatagcagttttttccaattctgtgaagaaagtcattggtagcttgatggggatggcattgaatctataaattaccttgggcagtatggccattttcatgatattgattcttcctatccatgagcatggaatgttcttccatttgtttgtgtcctcttttattttgttgaacagtggtttgtagttttccttgaaaaggtgcttcgcattccttgtaagttggattcctagatattttattctctttgtagcaattgtgaatgggagctaactcatgatttggctctctgtttatctgttattggtgtataggaatgcttgtgatttttgctagaaataccatttgaccaagtgatcccactactcagtgtatacccaagggtttataaatcatgccactataaagacacatgcacacgtatgttttttgtggcaccattcacaatagcaaagacttggaaccaacccaaatgtccatcaatgatagactggattaagaaaatatagcacatatacaccatggaatactatgcagccataaaaaaggatgagttcatgtcctttgcagggacatgaatgaagctggaaaccatcattttcagcaaactattgcagggacagaaggccaaacactgcatgtttgcactcataggtgggaattgaacaatgagaacacatgaacacagggcagggagcatcacacactggggcctttcggggagtggggggctgcaggagggatagcattaggaaaaatacctaatgtaaatgatgagttgatgggtgcagcaagccaacatggcatatgtatacctatgtaacaaacctgcacattgtgcacatgtaccctagaacttaaagtaaaattatatatatatatatatatatatatatatatatatatatatatatatatatatatgatgtgattaatatttaaattagtagactttgagtaagtaatattattctccaggcctggtgcagtggctcatgcctgtaaagccagcactttgggagggcaaggcgggtggatcaagaggtcaagagattgtccaacatggtgaaaccctgtctctactaaaaatacaaaaattagctgggtgtggtggtgcgtgcctgtagtcccagctacttgggaggctgaggcaggagaatcacttgaacctaggaggtggggattgcagtgagccaagactgcaccactgcactccagcctgggtgacagagtgagactccatctcaaataataataataataataatatcttccaagatgtggatgggcatcatccaatcagctgaaagcctttagagcaaagacaggtctctgaagaagtaattttgcctaaggactgcatttccagcaggcttgctctttcttgtggaatttggactcaaaactgcattattaactcttacctgaatttctagtctgctgacttatcctattaaaatctctatctctgtctctctctctctctctctctatgtgtatatatatatagacttatagatatctatatatacacacactatatatacgttctatatgtacaagataatatactacatataatatacaagataatatattatatatataattatctctccatatatctctccatatatctctccatatattatatatataattatctctccagatatatctctgtatatatctccatatatgatatcatatatatgatatcatatatcataatatatatgataatatacatattatcatttttcaattgatctaatttactcactcaagaattctttgagggcctactatgtattagagaaaccattctctatgctgaggagtcaagattgaggaagtttccatcatagatctttcatttctaataaataaggaataaattaaagaaaatacttgatacttacaagagctatgaataaaataaactaatgatataataacaccgcagtgtggctacacatgacttcaaaatacacttgttgggaatttgccactgcctgtggcaagttccctttctacttcacttgtaattctattacagtatttatcacctgtggggcatatatacgcatatatgcccatgtacacctgtgaattccttaagagcagaaactcatttaaatgcatatttctggtactagcatattgtcctctatatgtaatacatgtgtactaaatatttattaaatatatatttatttaatagataaattactgcatcctcccattctgtcaatttctgggaaactccgaaattaacccctcatctttaaaaagctacctttataatttttgaaaggatatgcacaagtataaatatgtgtgtatatgaattcaatacatgcacagagtttcaaaaatcaaatcatacagaatggctcaaaggcaaattattagttttcttagttgcttttcttaaagcttatccttgttcttcaaaaccattcgtatttaaatgctttggtttatagtggctaaataatatgttgatattacttgtgtatgatttatcaggtttggcttctcatcttattctattcacatataaatatttacattattattttggatatttaaaaccatctttgaaagttgatattatatttaaatattttccatcaactatagacagaatctagaggaatagatttttaagaggagaatagcagctcccctaattttgctttcacttcttcacacactttcatcccaacttctgtcaagtagaaatttcattgtcaagtttgataacatttacattgtctttgataaatgtacttaaatcttccattcctctctacaagaggattgccagaattaaaagataatgatcttcagcattacataatagcacaaaatgcaagtaaaaaagaaacaaaaactttaagaagaaaaaggctaataaaacagttgtgatacaaaaattaaagaactagtcaatttgttaaggaagccagtgagtccaataaaaagggtaagatagaataatagaagatgctaagaactgacattaaggtggatattaagaaggaatgatattaaaaatatcgtcaaaacagcgtatgttctttctcttaataaaaaaaatcgatcaatcaatcaattagaaatccaggaagtatcaaaaatatataacatattacaaaagcccaggtatgaagttaattatacagtcgggtgattgtcatgagcaacttgtgaattgtaacgagggacaaagaatcaatttcaacatcgccctttaaacggcaaaggcactgttaaatttgaaccatagggaagaaaatgtgcttgttgtctcagtacttgttctatggggcatgtttatgacattacagtaagagaggagttcttggtctttttccctctaatgcaaaactaacatcccgctaaatgcattttttttaaatgtagtagtgatacatttgaaatatctaattagttaatgtcttttatttaaactggatggaactatattcctaatcactttgctatcttaagcatatagatgtataaattgtaatttaaaagttcgtgctgatataaaagaggacaaatcgaaatcatttggaaaaatttcttcaaatagtttttataccaatgactctgcttagtttaagccaattagagaataaatgggattgaattaacaggcagaatatttttgactttatcatcagcaaattcagatatcatttaaatcaggtcagtgacaaaattaatttcatacgcattctctctgcttttcagtatcaaatttaattgatattttttcttattttcactccaaatacttccacccttctgaaactcccactccctgtccacaccaatcctgaacacattaccatgatagtaatgtctttacgtaagtaacttgatctcctccccctagaatattattccctaaattttcacaagactgacatattgtgattaagattttggtttaaatgtcacctcctcaaggaaatattttgtattttttcaaattaaactttaacgtgagaatactctcaagtaccttccaaagaaaataaataggtgacaaatttcataatctgaactattcttgttctatcccacagttgattgatggtttatggaattcttgactgaaaataatttactcttacaaatctgaagaaattgctcagtggaattctagcatccggttggatgataagaaattttctagtaatcggtttctcgtttctttgtaactgacttgttttgctttctctccaggaaatgtttaggatttttgttttcagcttaactgttcattgattctgagattaaatatctagaatatttgtactggaaggttttctggtggggtaggaaattttcttacattatttaaaaatattttctttttttctgttctttttttttctatgatctcttgttagatcttctgttaactaacagaagtagatttctagaactcccagaagttaatctttatacgtatcttattagttgacatttgaaaaactatggtttaacaatctagaatggctaactgatatttctaaaactttttagttagattagtgtttctagaactcctacttattgaaatgataatttctgtttttgtttttcttttttatgtcttactactttatctctctgttctaaattctgagatatttccatgtctttatttccagtgccctcagcttgatttttgtttaagcaataatatggtttggctgtgtccccatctcatcttgaattgtagctcccctaattcccatgtgtcatgggagggaccctggtgggaggtaatgaggtaattgaatcatggtggatggtttttgccgggctgttctggtgatagtgagtaagtctcatgagatctgccagttgataaaggggagttcctctgcacatgctctctcttgccagctgccgtgtaagacctggcttgcttcccctttgctttctgccatgattgtgaggcctccccagccatgtggaacagtgagtcaattaaaccttttctttataaattactcagtttggggtatgtctttattagcagcacgagaacaaactaatacaagccgtcatttttttttatgtttgacttccttcttactctcttatagtttgcttttcatattactctggtcttatgttttgtcttaaacatagtgggtttaactcatgtttactcagaacctctacatgcaaatttatttggaaatatgatctttacagatgtagttaagatgaagtcacattggattaggatggactgtaaatccaatgactagtgtttctatgaggtgaaatgacacacagatacagaccgagacaacatgtgaggatacagcagaaattagcattatgcagccagaggccaagagcaccaaggattgcaaggagcaactagaagccaacaagagtcaagaacaggttcttccctacggctttcatggggatcataaccttgctgacaccttgaatttgaactttagtctcctaaactgtaattgaataagcttctgttttaagccactcagtttgtgataatatatgatgggagcactagtaaactaatacactaagtttctattcaatactatatagaggtttgtttttattttagttattttctattgtcttaataattgttctttccacattattttgttagctttttgttgtccttgaagagaggctatcaaaagcatctaaaattctttttattaagtgttcagatttaagaaaaaagtagtgtaaaggctaagtagggttctgagtagataggggaaacctgtcacctgttaaattttaaatggttatgacagatgccgcatgatagttggctttgttctgtggcactgacatcaacaatatttgtccttctgtttctcagggattttatctactttctttggaaagaaaacctccagtacttcctgtcaatagcatcattttcccaaacactgtacttcagaatcatgggctcttctttgaaccctcctgtccatttattctccgtacccaaatcttcttaacttttcctttaaattctctcccaccactgtcaatgcatttaatttcctgatgttttcagtgaacttttaagcctttgttatttgatgcctgaacgttatcaggaaaattttatcttctttttcctccaaaccccctttcattttatatgccactaccaaattcatcttaaaacacttcctttttaaatcacttattctttccaaaacctcaggagctttccttaaccttagactaagccctgtgctttgggatccccagggttttctaacctccttgatctgatcttcaatggtctcttaatcttagcatcccctagtagagcttggatactggctccaataatcttaccatccccaggtagagctactggctccaataaactgatctactcacttaagtccccaaatgcttctatctcacttccttttacccatttgtttgtttgtgttaactaaccaagagtactttttcctctttttggcaacccacaattctaaaacccttcagtgcctcatctataaaaatatacctacacacttcattccacatgaatccttatgaaatattttagtcaatgatgaacgaatgatcatctatcatatcattcatcatggaccaaggtgtgtcacagtattatcttttcatgttgattcataatctgagaagatcctactctgcatttattttacacatttgacgcaaaggcctgaatacttgattccttaaatacatctataaaattttaaggatagaaagtaacaatataataagccattattcagtgtatttgattttaagatgaaggcttaaagtaaccttatttatgtgtgtttaattaactgaacggtgaaaagttctaatatggatgttcaacattacacttggtagagttaccataaagatgtgactaaagaggcacaagatgtctccttaaaaaaaatagattatgagtgtgggtatagtagaaacataagaaaaatactcagtttctacctcccttgctagaagatcatatctctcattacacaaattttaaacaccagatactttcccagcctgttttattagtaagccaggggctgtgactcagacagtatctccattctgttaatatgcttagattcaaatacacggaattattcttagtttatctttttctctaacacctcacattaagtccatcagtacatcctgcttcctctgctttcacaatagttccagaatctaatagtgggcacccacttccattctgccaccatagcacctcaatggtgttaatccaaaagagcccctatttgatttttctgcttccatgaatatctctccaagctcccattcccttcccaaagtccatacgccacagaggagcaggagtgaatctttgaaaatgttggtcagatcatatcaatgccatttccaaaactcaacatcaatttcacatttcactcagatcaaaagttggattatttactacaggctgagagctctacacaagctaatttcctgatgcctctctgataccattttctaacttcttcctccagaaaattttcttccttctgtgtgcatccttgctgggccccaggactttcaaaagaagaacattctttaagtatctgtacatctcattcctttacttcttcattcatatctaaattcaaatatgattgtaccaaaaaaggcttccttttttttttttttttttttttttggctggagtgcagtgacatgatcctggctcactgcaacctctatctacctcttgggttcaagcgattctcctacttcagcctcccgagtagctggtattacaggcctgtgccactgtgcctggctaattattgtattttaagtagagatggggttttgccatgttggccaggctggccttgaactcctgacctcaagtgatccatctgcctcagcctcccaaagtgctgggattacaggcatgagccaccacgcccgacccaaagaaagcttctttgaccatcttatctgaaacaaaatgtctcttgttttactctgccattaacttgcttttaaatcttatcacttatcacagcctgccatatgtttatattattgttttgctgattagtgtttgtccttcctaagtagaatataaatataaaagcagggagattttctgttttgttcactactggattactagtgcttatagcactacctggtacatagcaatgactaaagaaatgtgtgttaaataagcaattaaattaattaatcctgaccaacagaactgcttgggagatctgagaactgggattccatgataaaaatcaagaaatatgcaagcgtccatttccttcctacttttgatgatgttttttgaggatgtgatgttggaaactctgtagccttcttggaaccataagcagaggcatcagtaacactctatggaagggagagtagaatgctccagaaagccaggacatttggtgttgtgtagctaaccaattctaactttgtttcttgattagtcaacaaaaagtgtttatgccctgtttatttctctatgatgtaacctgtagcccaaatcattctggacatgagtaaagcaagcttgatcctgatgtctactcaaataatatggcaaacaatcttaatgagagccaaaaggagtgagaaattggatgtttgtgaacacaaggaatgggaatcatgagagaggttgctaaaatttgggcagtgagagacagaatagcatgaataggggcacagaagctcagcctggtaaagtaagatctgtgagtatctgggttctaagcttgttctgtctctcactagttttatggttaactaatttaacctattggggcctcagattcttgcaaaatgggaacaataatagtacttagaatgttgctgggaagattatctgtgacgatgagtgcatgacacttgtctacactgcttgtttttgagattattattacggtttaggatctaaaatgccaacatggagtggagtgtggggggtatgcacttaatttgagaggcaagtaggagacattttatttttattatgttaactgagagcattttgcaaaagtagcaaagaaccagagctaatagacttctttcctccttcccttacaagggaagccaagtaacgatatattgaatataattttgttcaacaaatatttgaaaccatagttggttttctttgttttgagcagttaattttctgtaccaaagaggtttgagaggaaaggatgagagttctcttccttttacagccaaagtaagtaattccttatactttatctaatgcccaaaatgccagaagcttacaggataagggtaattattaaaatgaatacacttcattttgcttataaacgtagtttgtgtttctcattattgcacccgatctataaccacatttacagtaaaactaaatgatctgtataatgctgaatatgtaaataagtatataatctgttgaaaatatctaaaaacattttacagacatttatactctgtattctggactgataattcttaatcatatttagtgtctttaatgttaaatactgccaatgttaaatggcagttaaaatagcaaccatgctcatttcttccaaatttctttgctgtggacactttcaggctgtagctgaactgtacagaaagatttttctggatcaaatcatcaggaagttcagtaacttttttgaacttggaaaagttaaggttgatatgtgaacatatttgttcacagttgttacattccatgtgaaaatagccagttccaagggaatcatctgccttttggcacctctttctacaagaaacaaaattgagtgcaattctttattatctccaatttgctttaacgaagtcattggaaatttaggaagtagggagtgatacatttcctaagaaatttacttatgattctttgaacaacttataatacaatatgtttaatgataaaaggagactatagagtccaaactttcctctgcctttcatattgtaaaagtttagacctactgaatatatatttatttctctctcttttttttttttttttttttgagacggaggttcactcttgctgcccaggctggagtgcagtagcactatttctcttttctacagtcaacttgacgaaagtcggactttttctgtagtttttctaattaaattgatgtggtttacctatagaaaggtaatttcgaaataattcaaaaaatatatcagcatcctttataaatgcaaagagcaatcacagaaaattttcataacatccgataagatctggctctcctttttaatttgtaaataactagaggatgaagcccctttcacaggccactttcatgaagcggtgttgttttcagcaggttatcgtttaatcattaactgaagagacagatctgggactaaaatatagttcaattccatatggtgtctgcattccttgggcatgacgcaaacatgttcattgaggaagttaacagtcactacaaagccggccaagctgtcgtagtgtaaaaatttggagattatttgcagtataatttttactaaagaaaaagaaatgagaaaagagcagagtcattcatgtaataataatactggaaaatgttttcactgaaaatattttaaaattctaaagaataattactgaaatccctccttgattaacaaaactttgtctgctgtgctcactttcttgaccttatttaacttaaacttccactcaggtgcattttctgcagaggatctcagagtggacgcacatcctttaaagagcctgtaagattccataaaagaatatttttctccaaattcacccagattcatccagctccctatttccaagattctcatgcatctcactcttaaaaattattggcttaatagatcttttaaactgatggaaaggcagtgtgttttgttctttaaatgttttaaggtataaaaatgttgactactattaatcttatgccagattattctgatacaattacaattcatgtgtctacttcatatttattattgactttcttcctccagcttgtagtccaggtctaattgcaaatttctcatcatatttaattaattaattaattttgacacagaatatctttctgctacccaggctggagtgcagtggtgtgatcttggctcactgcaacctctgcctcccgggctcaagtgatcctcccacctcagcctcctgagtagctggggctacaggcatacaccaccatgcatggctaatttttatttctgtttatttgtaaagaagggatttcgccatgttgcccaggctggtctcaagctcctgggttcaagcgatctgcctgcctcagcctcccgaagtgttgagattacaggcatgaaccactgcttttggcctcattatattttaaataaatgcataggttttcatttttcctcaacataattaacttcaatactaccattgcctctgttttatctattttctctcacattcctgtagggagtcatagggagtcattacttcaacagagtagactgtgatagcattttaaaaagtaaaataaaattaaatagaattgaaaaaatcagaatacaaggcacatgttaacagtattattattactttgtgaggggtgtgtgtgtgtgtgtgtgtgtgtgtttatgtgaatgttgtggagcatgtggtatttacatgtctactgggtcaggatgtaaaataaatttcttacagtggatccttttcacatctaaaagatgtgaaagccactactttagtataaattacactaacttactgattttacatttctattttttgtgtgaataactgagttgtttttataattttagctattcctatcacagaaattatgcatatatctctgtccttttcataaatagttaacttatgacctcatcaagagccttctaactatctcacagctgacatggattgaagtgaacatctaccttctcactgcaatacttccccattatctacctgatgtatttttgttaccattctgagtttttccaaatcaagaatgtttaatatttacattatttatccttttgttatcaattatctcttcttcagtaaaacactatattacttcaggcatgttctctattatgcctgaatttatgagtttctatcttttagggctacataatctgtgtgttctttgaatgttttaaagcacagaatggacgtgtagtagactgatcaggaacacgcatacttcccaagtgtaactaaacttgtatcttatccagaccacttaacagctatatgaactatagaaagataatcaacttttttgtacctcatttttctctgcaaaatgggccagtatcagtaaactttatgagtataaagaacaaatgagttaatctatgtagagcaattagtgtagggcctggtaaatggtaataacttactagattttaagaattattagaattttttgtgacaatacttttcccttgagggagtcatccaaagtatatttgtagtaataaaggaatgcattatgacggcctatttagtttgcccattttaaacatttgccaacaaaacatctggagatgagctggaatctcaataaaagaagttggaggatagcagacagtagaaaaaaaatccactcttatgtacaaacagagaatcatccagcaagaaaaaagccatcacgattattaaaagcaaaataaaccaataattttagcctgagaattaaaggaaagaaatgagaaaggaaggaagaaagggaggaaagaaggaagggaagaagccaggcaggcaatcggtaagtcaagaatattgagagcactgctgtgttcttgaattggaagatttaatataaaaaaacactgtccaaaatagacttaatataattcaaaattaaattcagacttttaaaatatgaagctcatatgaaataattaaaaagtgaataagttgataatttttttaagtaagagtgaaacttaatagttgttatgctatggttttgtataataaatgttatttgaatggcaaaattaaatatgaaagcatattttaaagttacaacaatgaaaactgtgtcactgaatcatagactgatcattgaaacagagtaaatagccgttaaattgattcttgcttacataaaaacttcaaataagaagaattttttattagcaaatgatgcagtaaaattgatcaggtaggcgagaatgttagagttttcctctgtagcaagtaaattgtaagaataacaattcaaaataaaatagcaaggaattgtttggattaaaagcaaatgttggttagtatttatctgaggtaaggacatctttatgtatctaaagttcattccgacagatgaaaagaggtacctgtctgatctgaatagccagaacaccaggacgggagcataacagggaggtagattgctttcctggtgatctgaaggagagctaggcatctccctcccttccccctgaaaaaacctcagtgcattacactgaaagcttccccagccacctctgtcaaagctgggacttctgcccatcattgaggtgttacatatacccactggcgttagccgcagccagtttttatccatggacacttactactggcctgaaggctgaactatttaacccagtgaaaaaaaatactgagaaagaaataaaagtgtgcatgccactggagaacaaggtatgcttcatgggatctgtgccattctggcctcatgggagacagtgaacttacccatatatccagcacactgctacaaccaacatctgagaaaaagtcatcatacagatattctctacaggcaagaaactcatacagagcctttgccactgaaagcatccagagccagagctaggtgaccataaactatacacattaaagtcacatccttaagggaaaaaagtttaaaataacccagtcaaatcaaaaataaattaaaaaataagaagaagaaatagtgtacctaaatgagaaggaaccagaaaaaagtaatacaggcaatataaaaaaacagacttccataacatgcccaaaatatcacactaatggtccagcagtggattcaaaccataatgaaatcgttgaaataccagagaaagaattcaaaattttgcctattaaattgctcagtgaggtccaatagaaagttgaaaaccagcataatgaaataaaaaaagcaattcaggatatggatgaaaaattttataaagagataccgattttaaagaaaaaccaaacagaacttttggaaatgaaaggtgcatttagaaaattacaacattcagtggaaatttttaacaatagattagaccaagcagaagaaagaatttcagagcttgaagacaaaggttttgaattaacccaatcagacaaaaatgaagaaaaagaatgaaaataaattaataaagtttctaaaaatgtatatgattatgtaaaacatccaaacataagaattgtaggttttccttaaggagaagaaagagcaaaaagtttcagaaaacctaattgaaggaataaatgaggaaaacttccctggtctttgtagagatttagacatccaaatgtaagaacttcaaaaaactcctgggagatttattgcaaaacgaagacatcatcaaggcatatagtcatcgaactatctgcagttgatgtgaaataaataaatttaagagcagtgagaaaaagcatcagatgactcataaaggaaaagctatcagactaacagtagacttctcagtagaaactgtacaagccagaatggattgagctcctgtccttagataggacaaaatacctgtcagacaagaatttgtatccggcaaaactaagtttcattttaagggagaaataaagtctttcccagacaagcaagtcctgagggagtgtatccccaagagaccaatcttataaaaaatgctacaaggagttgtaaatatctaaacaaaaggttgaaatgctcaaatacagaaacaataaaaagcataaaagtataaaactcacagggcttataaagtcgtaatacaatgaagaaaacaaagcaactaagtaacaatcaatatgatgacagaaacagtacctcacatatcaacattaaattgaatgtaaatagtctaaatgacccaccttagtagatacagattagcagaatggattaaaaaacacaaaccaatgtctgctatcttcaagagatacacctaactcataaagattcttacagactcaagagaaatgggtagaaaaaaagtatttcatgcaaatagaaaccaaaaattatcaggggtagctatccttatatcggctaaaaacagactgtatagaaacaacaacaacaaaaaaagacaaagaaggttgttatataatgccaaagggaacaattcaaccagaaaatatgacaatcctaaatacatgtgcatgtaatttcagagctcccaaatttataaaataaatactactagacctaaaaaaagaattagactgcaacacaataatagtaggggatttcaacactctactgacagcacttagcagattattgaggaagaaaatcaaaaaaagaaacactggacttaaactaaactctagaagaaatggatgtaacagagatttatagaactttctaccgcaaaacaagaataggcattcttctcatcagcacatgggatattctccttggttgaccatatgataggccacaaaacaagtctcaatacatttaaataaatcaaaatcatataaagtgtcttctcagcccacagcagaataaaaccagaaatcaattccaagaggaaacctcaaaactatacaaatacatggaaattagcagtctgctcctgaatgattttctagtcaacaatgaaatcaatacataatctaaaaactgtttcaaaatgagtaacagtgacaaaagttatcaaaacttctgggatacagcacaagcagtgctaaaaggaaagtttatagtgctaaatgcctacatcaaaatggcagatcataaattgacaacctaatgtcacacctcaaggaactagagagacaataacaatccagcctcaaaacaagcaaatgaaaataaataacaaagatcagagcagaattaaatgaaactgaaaccacaaaagcaatataaaggattcatgaaatgaaaagttggttctttgaaaagttaaaaaaataaaatgatagatcattagctgaatttaccatgaaaataagacagaagattcaaatctcaaacagaaatgaaaatggagacattacaactgataccataaaatacaaaagactatttgagactattttctttagtagtctctcactctgttgctcaggctggagtgcagtgatgcaatcacagctcattgcagcctcgacttcctggggtcaagcgatcctcccacctcaccctcccaagtagcttgggctagaggcatgtgccaccacacctggctgatttttttctttatatttgataaagatgaagtctccctatgttgtctaggcctgtctcgaactcctgggctcaagtgattctgttgcattggtctcccaaagtgcagggattacagatgtgagccaccccgtccaactgagactacaatgaacacctctatgcatacaaactagaaaatctagaaaaaaatggataaattcctgcaaacatacaaccccctaaacttggatcaggaggagatagaaatcttgaacagaccaataacaagcagtgagatttactcaataataaaaagtctcccaacaaaataaagtccaggaccagatagattcacagctgaattgaacctgacattcacagaagaattggtaccaattacactgaaactatttcaagtgattgagaaggaggcaaattctcattaacccattctatgaagtcactatcacactgataccaaagccaggaaaaggcatcacagcaacaacaacaacatcatcaagaaattacagaccaatatccctaataaacatagaggcaaaaatactcaagaaaatactagtcaaccaaacccaacagtacatcaagcagataattcattatcaataagtgagtttcatctctgacatggttcaatatacacgagtcaataaaagtgattcaccacgtaaatagaatcaaaaacaaaaagcatgattatctcaatagacacaggaaaagcatttgataaaatccagcatcccactcctttattgtaaaaaccctgaacagactatgcagagaaggaacatacctcaaaataataacagccatctatgacaaacccacagccaacatcgtattgaagggtaaagttgaaaacatttctgctaaaaactagaacaaggcaaggatgcccattttctccacttctatttaacatcgtactggaagtcctagccagaacaatccggcaaaataaagaaataatgctcacaccaattggagaagatgcgtcaaacaatctgtttgtggatgctataatctcatacctagaaaaccctaaagactctccaaaagactcccaaatttgataaataaattcagtaaagtatcaggttaaaaaaattcaatgtacataagtcagtagcactactacacagcaataataaccaaacataattaaatcaagaactcaatcccatttacaatatttacaaataaaatgaaatacctaggaatatacttaagcaaagaggtgaattatttccataaggagaatgacaaaacactgataaaataaatcgtagatgacacatacaaattgaaaaccatcccatgctcatagattatagggataaatattgtaaaaatgaccatactacccaaagcaatctaaagattccatacaattcctaccaaaatacctatgtcacctatccacaaaattaaaaagatagtggtgaaatttatatggaataaaaaagggcccaaatagcaaaagcaatcctaagcaataaaagcaaatctggaggcatcacattaaccaattttaaattatgctacaagactgtagtaaccaaaacagcatgataatggtacaaaagtagacatatagaccaaaggaaaggaatagaaaagagatcccagaaatagagccaaatacctacaaccaacttatcttcagcaaagaagacaaaaacacactggggaaaggacaccctattcaataaaatgctgtgaaaactggataatcacatgcagatgaataaaactggattcctatctcgcaccatatgcagaaattaactcaggatgaattaaagacataaaactaagacctgaaatcacaaaaattctagacaaaaacctaagaaaaactcttctggatattggctttggcaaataatgtatgactaagatcccaaaggcaaatgcaacaaaaacaaaaataaataagtgggacctaattaaacaaaaagcttctgcacaacaaaataatcaacagagtaaaccacctacagaatgggagaaaatatttgcaaaccatacatctgacaaagggctaatctctagaatctacaaggaacttaaacaaatcagccagaaaaatcaaataatctcattaaaaagtaggcaaacacatgaaaagatatttctaaaaaaaaaaaagatatacaaatggccaagaaacatgaaaaaatgctcaacattactaataatcagagaaattcacattaataccacagtgggattgttctttaccccagccattatttaaaagtcaagaagcaatagatgttgtttctgatgtgaaagggaacgcttatacactgctgatggcaatgtaaattactaaaacttctatggaatgcagtgtggagatttctcaaagaactaaaaatagacctatcattttttccaactatccttttactgggtatctactcaaaggaaaataacgaattatatcaaaaagacactggacacatatgtttatcatggcacaatttacagttgcaaaggtgtagaatagacttaaatgcccatcaaccaatgactgaataaagaaaatgtggtgtatgtatgtatatgcaccaaggttactaccttagccgtaaacagaacaaaatgattttttttttgtatatgcaccatggactactaccttagccataaatagaacaaaataatttttttttttgtagcaacttggatggaactggagactataatcctaagttaatttactcaggaatagaaaacaaaatactacatactacatgttctcatttataggtggaagctaactatgggcacacaaaggcatacagtgtgttgtaatggatattagaacctcagaagggggaaaggaaggaagagaattacacaagaaaaattacctattgggtcgaataatccttttttttttttttttttgagatggagtctcactctattgcccaggctggagtgcagtggcaagatcttgacttactgcaacctccgcctctgggttcaagcgattctcctgcctcagcctcctgagtagctgggattacatgcacctaccaccatgcctggctaattttttttgttgttgttttttgtatttgtagtagagacagggtttcaccatgttggccaggctggtcttaatcttctcacctcaagtgatctgcctgcctcagcctcccaaagtgctgggattacaggtgtgagccactgcgcccagccaggggatggatattctcaaagtccagacatcaccaccacacaattcatacatgtaaccaaaaaacatttgtatacctgatggtattataataaaaagactaataagaaaatgttggtaaagatttatttgacttttagatagagatctttatttaaaacacaaagtctgaaaagatataattaatcaagactgaaaaaagacagaaggatgattgtataaaaaatcctacttcataaaaatatggttgaataatcacaaagaggtacagatacatacttactagacagttaaagatatagagccaccgttttcttatacattgccaacgaagtataattggttcaactttggaacatattttgacattatctactaaggaaaaagatatacagttcttagaacatagcaatttcaccaactaataatattattctagtattgtcaaggagagaaatgtgacattgtttttcatttaaaaaaaaaaaaaagaaaaccaacagagacctcagaaataacaccacatatctacaaccatctggtttttgacaaatctgacaaaacaagtaatggggaaatgattccctatttaataagtggtgctgagaaaactggctagccatgtgcagaaagtagaaactggaccccttccttacaccttatacaaaaattaactcaagatggattaaagacttaaatgtaaaacccaaaaccataaaaaccctggaagaaaaacctaggcaataccgttcaggacataggaatgggcagagacttcatgactaaaacaccaaaagcaatggcaacaaaagccaaaatcaacaaaggggatctaattaaagagcacagcacagcaaaagaaactatcatcacagtgaacaggcaacctacagaatgggagaaaaattttgcaatctacccatctgacaaaggtctaatatccagaatttacaaagaacttaaacaaatttacaggaaaaaaacaaccccatcaaaaagtgggcaaagaatatgaacagacacttctcaaaagaaaacacttatgcggccaacaaacatgaaaaaaagctcatcatcactgatcattacagaaatgcaaatcaaaaccacagtgagatatcatctcacaccaatcagaatggcgattattaaaaagtcaagaaataatagttgctggcaaggctgtggagaaataagaaaacttttacactgttggtgagaatgtaaattagttcaaccattgtggaagacagtgtggcgattcctcaaggatcttagaaccagaaataccatttgacccagcaatcccattactgagtatatactcaaagaaatacaaatcattctactataagacacatgcatacgtatgtttattgcagcactatttgcaatagcaaagacatgaaaccaatccagatgcccatcaatgacaaactgaataaagaaaatgtggtgcacatacaccatggaatactatacagctaaaaaaggatgggatcgtgtcctttgcagggacatggatgaagctggaagccatcatcctcagcaaactaacacaggaacagaaaaccaagcactgcatgttcttactcataagtcgaagttgaacaatgagaacacatgaactcagggaggggaacaacacactctggaggcttttaggggccgggggcgaggggagggagagcattaggacaaataactaattcatgtggggcttaaaacctagatgacgggttgataggtgcagcaaaccaccatggcacatgtatacctatgtaacaaacctgcatgttctccacatgtatcccagaacttaaagtaaaataataaaaaataaaaataaaaatgaataaaaaacaaataagatgttttgttctttagaaggtgttctaatctagccagtgctaggaagccagcttactcaagggttaatggacaaatgctttgaggcatataacatagaagattcaacaaatttattttttaaacttcattttaaaatttataattgacacattttaattgtacatatttatgggatagaatgtgatgcttcaatgcatgtatgggtattataattatcaaatctgtataattaccatatctatcaattttcacatttatctttttgtgtggtgataattcggaataccattcagccataaaacagaatcaacttctgtcatttgcaacaacatggaagaacctggaggacattaggttaagtaaaataagccacacacagaaagacaaacatcgcatgatagagaatagaatagtacttactaaaggcttgagagggtaaaggggatgggggctgggagaagttgctcggtgggtacaaagttatagttagataggagaatacatttcagtgctctattacacagtagggtgactataggaaataacattacattccattcttcaagatggctagaaaagaagtttggctttgtttccaaaattgacaaatgggatctaattaaactaaagagcttctgcacagcaaaagaaactaccatcagagtgaacaggcaacctacaaaatgggagaaaattttcgcaacctactcatctgaaaaagggctaatattcagaatctacaatgaactcaaacaaatttacaagaaaaaaacaaacaaccccatcaaaaagtgggtgaaggatatgaacagacacttctcaaaagaagacatttatgcagccaaaagacacatgaaaaaatgctcatcatcactggccatcagagaaatgcaaatcaaaaccacaatgagataccatctcacaccagttagaatggcaatcattaaaaagtcaggaaacaacaggtgctggagaggatgtggagaaataggaacatttttacactgttggtgggactgtaaactagttcaaccattgtggaagtcagtgtggcgattcctcagggatctagaactagaaataccatttgacccagccatcccattactgggtatatacccaaaggactataaatcatgctgctataaagacacatgcacacgtatgtttattgtggcactattcacaatagcaaagatttggaaccaacccaaatgtccaacaatgatagactggatttagaaaatgtggcacatatacaccatggaatactatgcagccataaaaaatgatgagttcctgtcctttgtagggacatggatgaaattggaaatcatcattctcagtaaactatcgcaaggacaaaaaaccaaatgccgcatgttcccactcataggtgggaattgaacaatgagaacacatggacacaggaaggggaacatcacactctggggactgttgtggggtggggggagggggtgggatagcattaggagatatacctaatgctaaatgacgagttaatgggtgcagcacaccagcatggcacatgtatacacatgtaactaacctgcacattgtgcacatgtaccctaaaacttaaagtataataataataaaaaaaagaaaaaagaaaaaaaaaagaagtttggctttgttttaggataccaagtaaacaggtttttttgtttgtttttttgtttgtttgtttgttttaaaagggaaggccatataacgttgactgcattatgtctatgcttgggacacagggtatttccatctggcagttaattattcaaagaataataattttataatggtataaagtcatccagactataaacaatacggacacttacaaagttgttttatatgtttagtatagttttgatacccaaatcagaataggactatttgtaataaaggaaggttacaggtttatctgacttttgaaaaaatattttaatattctacataacaaatgataagaagatttccataaaatccatcataacccagaagtttaaggatgattttctaaacaagttacaggcatgcctacctaatattacaccccattttctacttgccaatgaaagctgtttatttagtaagtaattccttttttttatttctctttctcgtcttcctttgcaagcatgcaatttgaacatatttgtggccagtgagatgttatcaaatctggttgggcatttgcatgaaaaggttgttctctctcaatgaaatgaaacaggttctgggaccacgcttccttgtctcttcttttttttttgaataatggcatgttctccaaagctctagtagctaccttcaaacacttaggtaaaagcatgagggtgaaatcataataagttaagcatggtacagtgaaaagatgacaaaagccttgatcccttatctcatgtttaagaaacgatctgcttcatctactgccatctttcaacttactctcacttgaagaaaaaaacaaatacttcagtcattgttagttttatttaatggcagctggcagcactcttaactgattaaaaatatgtatcatgaacaaatgctattctccatactaatggatctgatggatgaaatccagatggtcatgtcaatagatgtagagaaaaaattcttctttaaaaaaagaagagcaatttataatttagacaaatgtaatgtaggaatcaagaaaaaaaaaactctctaaatctgataaagagcattagcttgaaacctgaagcaaacataattaatcgaggaatatttgcagcattagccttgaaaccataaagtgaatttacacaacacacaacacgtgctgtaaaacatgactataccaaaataatgcttacttattaaagtaaatggatgctgaatgaggtatttactcttttttctcaatgttttgactgaagttcgaaacaataagaatattggagaaccacatcaatatttgtaagagatgtgcagttagaccgtggcatgcacaacttgctaaactatagctaatcttcattaaatccattaaaaaacagctgaccacactccctaattccatagaagagaaagtgtagattatccacaaaccgtaactattttttcttagttctctctagggtcaaaatgggagattttctggagcttcgtgaaatggaaggaagttgcctgcatttccaatgtttgttatggccagcagagccacccagctgtacaactccatgatgcattctttcaacttgttcagtgcacaatcccataaactatgaagcaagtatgctttgacatgaatgcatgtgtttcctctgggccaagaaaatgccatggaacataactggaatgaactgtcttgatatggtcccaaactggaaagctagcttcctgagctacctctatctggagggatatttccagaaggcagaagataaaagtgggttataagaggctaccacttataaacttcagcggtgaatcggggaattccagtgtgtacacacctatgggagagattctgaagactccattgacagaggccttggaaaagaaagtatttggatgcttgtcacactcagagatattgacaaggaaggcaggtctgcaaaaaaccctacttagatataaagaattttgccctgtttctaagtattcttttactctcaattaaggaggatctggaatatcaacaaaagagaagaagtagacaataaaacaaaatcacaatgtgagagaagcaaaacccggggttttaaccagttctctgaaatgggttccatagctatgacctcaactgaaagggagagaagacgcgttacattaaatataagcttgaggttttgggttaaactggtaatttcaacccctgaagagtaatggtaattatcaaaaatgaacttatatttgtaactgtgactcaaaagccagggacttttctgagtttttgctatgcagggacagataaaagaggtttgacacaacacataggagttaatgaaaggaggaaaaataaactaagttttgatagcatttaaatcagttcagaaatttcaaaacctgggaaaattttaactccaaatattttttagagactttaaacatgctaacatgttaatctgtttattttgaataaacaatatcagacttaatttatatatgaataataaaacatgcatttaattttctatagtcagaatgaaagttaaaacaacaaatagttgtgtgattcctagtttatttctttgccttctaaatacatttgacaaatcatctattctgtctggtttcttatctcaaattcaatatttccattaaggggttaaatctttatttgggtcaagacggacaattaaatcatctaagctcactgtcaaatttactgatgccatgagtgaatgtgtgggacatttggcttcagcagtcagcaaacgtcaggggactgatattttctttcatatgccatcttttcagtcatataggattagaggtttggagtctttcagatgcacattggatacatagagttatattaaagggatttcctttctttcaagtgggctcagtaatagggaaaaataagaattttttcaatatctcattttattgcaaatgtggattttaggaccatgatgattaaataagcaagtgaatgaggttgagattataaggttgaaagccatctctgctattcgcaaaggaaagaagaaggcagaggtgggggtggggcagagaagaaggctaggaggagaggacatggctgaaggaggagatcatggactggcattctgaatactggaaccaaatgcttttgaatgacataactgggtttgtgctataaaatcagatgttcttctggtttctgagtgtcatatgttcactgaaaagcattagaaataataacaaaataattaatttaatcagcagtccatccagtttcataacagatattgaattactaaatcctgtttctgaattttacccctctggtcgaatataaaatgaatagggaaattattttcaccgctgaagtttattatagatattctctgaactttgctgcccattcagaagatcttaccctctcagttattggctatgtctgaagagaagcctgtggtgttgtcatgaaagctgcgaagacccgtaagtgaaagagatgaatattaaccaaatgccaagagcaaagcaaattatgtttaggttaggaccgtgtaacaacttggttccactcatttacagtggctgttcaaattgatgagctgaaatgtttatatgctgatatcaactctgccctggttgatttttattctagggtatttgcagagttcccactttcaaatgcacgtagagaaaataatccccatcaggacatctggcattgtttttaaactatcacttcactcagcctttgactgctaatttgtttttctttctaacttgtttaatttggaacaatcttgttgtagtctttacagcctctctgtggtgtttcttcattgtaaaaaacaatatgaaatgcaatacaaagtcttccaccactcactccatgaagcatgcactataatataaaacagacaggttgccaatgatgggcatccaatagcctattatttattaatctttagcattgatataaaagaaggaataaatatattatttggtaattaaccatattcttctgctcctgaattctaaatttttgagaggccttgataatcaaaaatcaataatactttacttaattataaattctggttcactttgaaaaatggtagagattattatatttttcaattgtttgaaacgataaattgttcattggactgaacaacgtgtctttttctcttcaaataattttatttccccaatctccatgtaacctttatatatggaagtcgcacgctagaaacatggataatcatgtcattcatctcctgattgattcagatttattaataatggtacttatgagtattaaaggtatttgacttccatcatccactactgtggtagttatgctactgccctatttttaaaaacctaaattctaaaatcattttgatcaacctccaaccatggacaaattacttcatacttggctgtatgtacctattaaaagatatactatacagtgcaatatgtcatccaatgttttatctgaaaatatgtattccaactatagtaggttaccaggggatctaaaatgccatattatttcaaaatcgaagacatgtagttcattttagttaatgatttttagaattcaagattagatatggatcagtctacactattaagtttattacattaagtcatcaggagaataagtaaaagggtgttttgcttgtgggaaaaaaaaagagacaaaaatatgtctggttttcaattagataaaaccttcaaactgctcaaggcatggtctttattgatttaaaaataaaacccaaagtaatacattatatattcctatttaattatgtataaatatgatggacttaaaacattaactttatttcttcttatttatgatcagtttaactacaaatataagctgtacctttgcatatcaagtcctatattaaaagattattctttttgagatttaaagagcacatttataatatttaattaactgtaggaggactatttttgtagattttgcaatttgtttctcagtttaatataatagattttaattaaaaatgtagtttctattcattggtgagtattgcattattcatcaccagggtacaggatctaacaaatatgtaacattttaaaatagcagtgttgtcacatactttaggggctcgatattaagtagaaggtgttgtttaataatagtaaagggaaagacaaataattgtttttctagtctaatttgtttttgatattcatagcaaaaatctcctttggcttctatgataaatacatatttatcaactgccttccttagagtataaagtaaaacaaagaactcttgccatgtccctaatctaaagtaaacctggtcataagccaaattattctgaagtgcctgctaaatttgaatcttagaatatttgccaaatgtgtaacttgccttaactgtgtatattgtacagtcaaatgtcaacagtgtagttacattgctaaaaaccttggctttcagcctcatcttgcaattgagtgcagacataacatatgaaaaatacattttatataatctagtgtcagtgggcatggttactatgataaaattaaatatcaacaaataaaaaataggcctttgcactaaagccatgctttgtctttcagtaatattagatgttagtgagaaaaatgttttcctttaaatgatgcaaagattaagtaaagaaacttgcagaacctattatacttgttctcaaatttggagttctaaaacacaatgttcatgaataggttatagaagtacaacaaaattatcagggactttaatggaggttcaatgagggaaaaatatatgcgtgtccatccaaaaaagcaattctattattttggggatggtgaaacattgtttggaaatgaaaacaattatgaagataaagctttcatctttccagcccaaccagttaacttaacattttagactaaaatttggtgcaaaaagttgccatgttttctaaacttactaatagttatattacctatttacaaagtgctgctttaatattttaaagccatattaaatttatttatactagcaatttttcagcctaattccaaggatgatactcagggtgttatgaatcttttctgaatgcctgcaaaattttgatagaataggctttgtattagtttgttctcatgctactaataaagacttaactgagaatggataatttataaaggaaagaggtttaatggactcacagttccacatggctggagaggcttcccaatcatggcagaagatgaaggaagagcaagggacgtcttacatggcagctagcaagagagtgtgtgcaggggaacgcttctttataaaaccatcagatctcttgagacttacttactaccatgagaacagcacaggaaagaccttcccccatgattcaattacctccccctagaaacctcccatgacacatgggaattatgggacctacaattcaagatgagatttgggtagggacagagccaaacgatatcattctgcccctggcccctcccaaatctcatgtcctcacatttcaaaatgaatcatgtcttctcaacagtcccccaaagtcttaactcatttcagcattaactcaaaagtccacagtccaaagtttcatctgacaaaaagcaagttcctgccacctataagcttgtaaaatcaaaagcaattaattatcttccagataaaatgggagtacaggcattgggtaagtgtacctgttccaaataggagcaattggccaaaacaaaggggttacaaggcccacgtaagtcttaaatttagtaaggctgtaattaaaccctaaagttccaaaatgatctcctttcattccaagtctcatatccagtttaccctgatgcaagaggtgagtttccatggctttgggcagctccacccctatgactttgcagggcacagcttccctcctgtctgctttcacagactggcattgagtgcctgtggcttttctaggtgcacagtacaagctgttggtgaatctaccattcttgggtctggaggatggtggccttcttcccacagctccactaggcagtgctccagtagggactctgtgtagtggctccaactccacatttcccttccacactgccctagcagaggttctccatgagagctcctcccctgcagcaaacttctgcctagacatcccagtgtttccatatatccactgaaatctaggtggagattccaaaacctcaattctagacttttgtgtacccacagacttaacaccacatggaaactgaaaagcttggggcttgcaccctctgaagccatggcctgagttgtaccttggctccttatagccacagctggagcagttgggatgcagaacaccaagtccctcggctgcacacagcagcggggctgtgggccaggcccacaaaacaatttttttctcccagccctccagtgctgtgatgggaggggctgcttggagggtctctgacatgccctggagacattttccccattgtcttggcaattaacatttcgctcctcattaggcaaatttctgcagccagcttgaacttctcctcagaagatgtttttttttttttctatcacatcatcaggctgcacattttctgaatttttatactctgcttctgttttaaacataagttccacttccaaaccatatctttgagaatacataaaactgaatgcttttaacagcacccaagtcacatcttgaatgctttactgcttagaaatttttttccaccagatgtcctaaatcacctctctcaagttcaaagttccatgactctctagggcaggggcaaaatttcaccagcctctttgctaaaacataacaagagtcacctttattccagttcccaacaagttcctcatctccatctgagatgagctgcatttagtcaaagtcattcaacaagtctctacaaagttgcaaactttcccatatcatcctgtccgcttctgagccccccaaactgttccaatctgtgcctgttacccagttccaaagtcacttctacattttagggtatctttagagcagcatcccactacctggtaccaatttactgttagtctattttcatgctgctaataagggcatacctgagactgggtaatttataaaggaaagagatttagttgactcacagctccaaatggcagaactaatcatggtgaaaggagaaggaagagcaaagggacatcttacgtggtgttaggcaagagagcgtgtgcagggtaactctcctttataaaaccatcagatctcctgagactttcttactatctcaagaatagcacaggaaagacccacccccattattcatttacctcccaccggatctcttccacaacatgcgggaattatgggagctacaattcaagatgagatttgggtgggaacacagccaaaccatatcaggcttgtatatattggtttagggtaagagatgggggttagaaaatctaaattcttcatcacagtcttcagtagattttgacccattcaaaagctaagaatcactagtatgttccattctattctgatacttggctgcttctgtcattatactcttctaccattatccttccttaaaaagttattttgctgtaggcagatattctgagtagttgaaacgaaagtttcagtcttaaatgttttctccatgatgtaatttaatagtgatctgggtaaaacttaaaacaccacttttaatagagtgataccctaataaaatacactttcatggagctttgttaaatatgtctgcaacagtgtgctactgtttttaaaaacattttctattttatattatacagatatgagaaaactgccattctaacaattacaatgagctcaaatgccttcagtcttagaacaaaaccagatgaaaattattgttacttaaaaaaaaatagatcttttaaaatgaactcttcctcccactccaaatttctccattgtgatgtaacttaaatattgctgtttctttagtaaaaaaattaaaaaagacacgttttgattattttcataattaatatattagtagcaatatttttctaattgccattactcttttgtactttgttatttttgctgtctttaacctagacattgggaaagaaaattttaaaaaatgtttttaacagcttctttaggagcccagttcatgcttagtacagtcatcaaaaattctactaagcttcacaaactattatatagatttttataatacctagtttcttaaaaaaggaattagattacagaaatttgggcttaaaatattttaactttttattttgggataactttagatttacagaagagttacaaaaccagtgcaaagaaatctagtgtaactgtcaaccagattctctctatgttaacacttaacataatcaaagagttgctaaagaaaataactccagtacctttattgtaactaaactactaactttttttggtgggatgtggggttcactagttttcccagtcatgctccttttctcttcctagctcccatctagtatcccatgtatttatttgacatgtatgctatgttctttctatctgtgacagtccttcagtctttccttgtcttttatgaccttgacacttttgattaggcttgtaagttattttatagaatgtctgttaatgtgcacctgcctggtgtttcctcatgattatactacggttatgaattatcgggaaggatactatcaaggcgatgtgccattctctccacctcatatcagtagatacatgatattgatatgtattactggtaatgttaactttgattaattagttaaaatgataccatgtggattctacaactaaaataactatgcttccctttatacttatgaaatatttgggtatagtggggagattctttgagtttacaagcatcttgtttccacttaaacttctactcactaatttcagtatccatgggtgggtcttgtctgcaactgtgatgttctaatagtgatgctctatttaccccatttcttctacatttattagttaagattcttttgtaaggaaggaatgttccctctctgttattatttacatattctgtttcttataacatcaacatggaatcatgtgtgattgtgctattactgaaaaagaatatttagaaaccaaaaactgggggttaagtgggctcattgctagtggaatttcactgcttttattaactcttgatgaatagagacaggaaatatatgtatgtgtattactgcatgcattcacacctatctgtcacacacgtgagcatgtgcgcgcacgcacacacacacacaaattcatttcagcaccacaggtgtcattcttcaaactatatttagttgttgttgttattcacattgttcagttacagcaacaggattctatgaagttggtgctttcatttgggctcttatagcctttccacatgctcccatccttttctgtttttatttgttggctttgggcactttcttaacttcaagtaagaaagcaattttagtagccacaagattctccaggctcactttatattttccctgccccttctctgagatcttccatatctcctagaagttctgactctttttgttggaaaataatatttagaaaccaagaactggatgttaagtgtgctcactgctattggagtgtcagtgcttttagtagttctcggtggatagagacaggaaatgtatgtatgttcattaatacctgcattcacacctatctctctgttaacacacacatacagttcatttcaacaccatgggcatcattctctctttccttcttttcttatttataacttcttgggaagtctgacttttattatcaagaatatatttgtttatcttttcaaccttagtataaaagtaaaataatttaagaatttgtaattcattaccaactagaatatagtgtttgtgtacagtttgtttgcctttagccatacaatattcagtcaaaataatgtttttcacagtttccaagaacagctcccttcttcgttatccccttgagtgtgggtatgtgattcatttgtaagacatttagatccatttattgcaatctacattccatctttccccatacactgactggtatgtttttaacattcacatgcagtgataattattttttgtggtgtacagtttgatttgttttgacaaatggatacagacatgtacccaccgcaacaattccatacagaagagtcctatcacccccaaaatgttcttctggtaacttttcatcatcaaaccatccccatttttcccaaatcctgcaataacagatctgttgttttgtccatatagttttgctttttccagagtcttatgcagatggaattatgacgtgtacagtttttgggtctgattttttttttggcaactagcaaaatatattttaagatttatgcatattgtagcatcaataaatatttttgtttctgttttttgactactattttccttgtagggaatatgctaaaaagagaatttaaatcacccaggctggagtacagtggcaagataatggctcactgccgcataaaactcctgggctcaagtgatcctcctgcttcagcttcctgagtagctgggactataggcaggagtcaccatatttgttaatttttttttaatttttagaaattgggtcttactatgttaaccagctggtctcgaactcttggcctaatgtgatcctcctgcctcagcttcccatagcatttagattacagatatgaggcactgagcccggccaacctcactttttttttttaataatttttttctagtgtgctccaaatttaaagataggttacattgattttctttcaaatgtatatgaggaaaagttttttttgtttccatttcacttttcgtctgagctatggtgaacagagttccaaggaaaaggggataattactagttaagttgacatttagtaactggtgttttactgagtaaagttatattcatgtccaaaggctctacagaaatatacatgtagttggaacaaatctgaaagcatcatcatttgtagaaatgcagagaagttatttagggaaagtattatgtccaagcacaatagtctatgatcaataatcagggactgagttcaaaccctaactccagtgcttactacctgtttactacctgtgtggccagtgtctcaatgtcctcatttctaaggtgggataacaatatctacatcacaaaggttattttgagctttaaataagatacagatttttaaagtgtttaacatagtacttgggatgtagtaagtgcgtaataaatgttaagtatatgtagatatttatttatatatctcctagagaaaattccctgccccaaaacatgtgtttctaatctaaataactaaataactaggtgataaattcctgagtataagattagaagtctgctgaaaggggaaggagattgtggagaggactctgttgagtgtcatcctctataatagtgtgaccaaagaaggctgtctaaactgtgcttcacatagaattttccagttctatctgacattccaaaaagaggggtcagaaatgaggccccaaaatagccttgtgtatgtgtttatgtttataaatggttgatttattacatagtaattggtaagtttatggaagtatgtaaaagatatacacaaaaggcaaatccactttattgtaagttggactgacttttattgtggacgttcagtgttgatctttcctagattgcaataattctacctgtgtgacatcttttctatctgtacaagttgaaacagtgtcaacaataaaataaaaatgagtatgtggctgttatttaaccatttaaatgcatctccagattcgttatcttatttgatactttaacacacatttacacacacacacacacacacacacattcacacagagatcttgtgaggtaagaatggcagaccttgctaatcttatttgacttttctctgagctattgtattacctccttaaaagctttcctgtctgtaatcttttgctgtttccattcttcttactattgctgaataattatcatcaagcatccatcatctctctacttcagaagagtttaattatttctgattattattctaagtaccagaaatagtaaaaagaaataattaatcaagaaaataaataaataaaatatgacacatcttttcccctaggagaatatatccatctagatcaatgccaaaattaagtgtgataagtactataacagaaagatatagagatcatcgtagaagacagaagagagagacatctaagtcagacttggcaggcaggaaaagcttccttgatgaagaaatgtatagtctgaattttgaaggcccagaaggaagtccaagatggtaagaggccgagcatttcattttcaaggcattatagctgtaaaggcacaaaggcatgaaacacgtggggactgtggatggttcagttaacagagggagatagtagtggagtggtaaaaaatgatgagaggcagtaaaaattcatatgacaacatttgtgataaatataacattaccttaaaagagttggagaaaatggatgcactttgagcctctatgtaacatgattgtaattatagaaataccattctgaaaataatgtggaagatggattggacatggggtatgagagctggtgagaccaagcagccaggcaaaggggtgttgcagaatttcaggatgtagcaatgagtgtcataagttgaatagtatttatgagactgcaataaaatgaagggagctagaaagagataactcagaagtatggggagaagatggggattgaattcatgaatttaggaaacacatctatggtgtgggcttgtgggtaaagggatgtctcttgtatgcaaatatggatggaaaaggaagaacaagtgcaagaaattaatacagcacatgttatttggaatattctgtgtttaaaagtagacatctgataggcttttattctattttattttattttattttattttatgatggagtcttgctctgttgcccaggttggagtgcagtggcacgatctcagctcgttgtaacctttgcctcccaggttcaagcaattctcctgcctcagcttcccaagtggctgtgattacaggcacacgccaccaggccaggctaattttttttctttttagtagagatggagtttcaccatgttggccaggctggtcttgaactccctgacctcaaatgatctgcccacctcagcctcccaaagtgctgggattacaggcatcagcgactgtgcctggcctgataggcatttaatatatgtcaactgctggacacagaggcatgagatagaaaattggcgtttattaacatacacatggaatatgaagcaaaaggtttggatgagtatacttagaaaactgatgtaggaaggacagaggactatagcttaagctacatttaaaggacaatgaaaaagaagaccatgcaggaagctgaggataaaggctaggtgaatcaaaagaaatcagagagcagcaggatggctatcaaggaagaagagtttcaagaagaaagggggtgctcaactttgcaaaaaaacaaagaatttcagtcagaaaggaaagaacgatattcactgtatagtcaacattaagtcactgaaggacttaagaagagcatttgtattgacctatggctggtgttgtggactaaactatttcccttaaaatgtgtatgtttaagtcctaacagctagtacctcagaatgtaaacaatttggagatagaactttggttaagcaggacaaaaatacagtcacatagaaggaataagttttaatatttgatagtacattaggaaaattatagttaagaacaatttattggatatttcaaaataactagaagagaagatttgtagtgttcccaaaacaaagaaaaatgttttaggtgaagctgggcgcagcgactcatgcctgtaatcccagcactttgggaggctgaggaaggtgtattaccttaggtcaggagttcaagaccagcctggccaacatggtgaaacatgtctctaacaaaaaaagtacaaaaattagccgggcatggtggtgtgcacctgtagtcccagttactagggaggctgaggcaggagaatcacttgaacccaggaggcagagcttgcagtgaactgagatggcaccgctgcactccagcctgggcaacagagtgagactccatctcaaaaaaaataaaagatgtttgaagtgatgatggatatcgtagttactctgatttgatcattatgcattgtatacaggtatgaaaatatcacatctacccacaaaatcgctacaaaactaaacaaaatgagttgttagagtggaacctgatctaatctgactggcgtctttatatgaagaaggaatttggacacacagagggacaccctgggttagtgagcaaaaaaggaagaccatgtgaggacacagcaagaaggtgaccgtctgcaaccaaggagagaggccccagaagaaaaaaagacactgctaacaccttggtctcagtaagaaaattaattttggccagttgtggtgtctcaggcctgtaatcccagcactttgggaggctgaagcaggcggatcacgagggcaggagatcgagaccatcctggtcaacgtggtgaagccctgtctctactaaaaatacaaaaattagctgggcatggtggcacgtgcctgtagtcccagttactctggaggctgaggcaggagaatcgcttgaacccaggaggcagaggttccagtgagccgagatcgtgccacagcactccagcctggtgacagagcaagactccatctacaaaaaaaaaagaaagaaaagaaatttctctagttgaagtcactcagtcagtggcgttttgtgatggcagccccagcaaattaattaacctgggaaggaggcaattttatgaaaagatgaggactaagttggagcaatggatgtgggtcactcttataagctttacagttaaaggcagcattttttagagtagagagaaattttttttttttttttttttttaagatgaagtctacctctgtcgcacaggctggagtgcagtgacgcaatcttggctctctgcaaccttgtgcctcagcctcctgagtagctgggattacaggcgctggtctcaaattcctgacctcaagtgatccgcccgcctcagactcccaaagtgccgggattacaggcatgagccactgtgccctgccaagggtagagagaaattcgacgtggagaaacagccttagggtttgttggctggtttcgttttgtttcagataggagacaagtgagcatgtttatacactaaacatgtttatacatatttttatacactaagcatgtttatacaaatgtttatacactagtgaagaaggactttttaatgccctaaagttctaagaaacctcaagaagaggctaataactcatgcatttcttcattttggaccaagacactggtaccagccatatagacagcagtaggaatcattcaggggatacaaaggtatgtaaggtatagatatttcactcaaagaactttctctgcaatggagaaaacaaacacataagcagtatattacagagcagtagaaggactgttaggttaaaacatacagaaacatctggaagaaatgactacactggccagatgtggtctaagaatgttgtttagagtaggctatacctgacctgaatattaaaagacaatataaattattcagcaaaaataaataaggataaggttaataagaaaatgataaagtaagtttagtagcttttgcaaaagcaggaaggcaaaaggatagcatagaacaatactgttaagaagatgtgcttattctttagttagaatgaattgcttcttttattttctcacacactaaattagtttagtttgactgaattagtttaactaaagtgtgtgtgggggggatttaataactacacatttgcaataattttgcaataactatttgctgcagtgcaaaacatcactaataagatctatattgatttggggtccagagcatttagttacaggaatatcataaaggctaccaatatgttagtttcctactgtacacattgcagcaagtttagtggcttaatacaaatttttcttataagtgtgaaagttagaagtctgaaatggacctcattgttttaaaaattgaggaatcaataggacggtgtttctttctggatcttctaggacagaaatgatttccttgacttttccagcttcttgaggctgcccacattccttggctcatagaggtcttccatcgccaaagccaacaacggcctttcaagtcttccacttgttgcatcactctgatactgaatcttctgtctccctccaaatttaagaaactttctgattatattgggactatgtgggtaatcccggataatttctccatattaaggttgctagcatagtcacagattccagagactgagaggtgaacatcttcgggaagccgttattctgcccatcaaagtatgtgctctggtcctgaagattcaaattcaatctacatgcaaaatacatccacctgtctcatcatccccaagagtctcagtaccttacagaatcaactcgaagttccaaacatcttttacttcttatcaactctactatatggagaagatttttggaagtaaaggatgtgtgaaattatttgtatattttaattatttaattgcatgtatttgataacaatttaaatgacaacaattttggtcaatgtaaaagaaatgtttagtttaagtctcaaaactgatgttacgaacattgttatgttcataaatgagggtaacagactaaaaatagcgagtacactctattagtatctcctgtggacattagtatctcatgtggatcaattgggaaatcattattcctacaataaattttcagaaataaatctgaaaataaatcatgagttgtatcacatcatcagtgtgcacatttatggaaatgtaatagaatggccatagaatataggttatgcttatagaattctactccaggaactggaaaatttacagctgcctaaacttatcactgaactcaagaaataaccccttcagatattttccatgaagctttactcagagtttaccacagggcttaaaagactactgaaactacacttggaggccttaatatttttgaaagaaggaacattttataaccagaaaattaaaaataatattattaaatttgtgatcaatctatagacatttacttatggcagaagggttgcttgggaaaatgatttatcttccatcatcgcatattaataagaaaccagaaaatagcttccttctgccaatcttgactgctaatgataattacaataatttgtctggtcccagttgtgggaggaacgccatgatttcttgtaactctctgtgcaatgtcatcagctctcttaaaaaccctgaaacttgtgtgctatttcacttttcacattcttttccttacccaaaattactatagcagagctaggtttcgacctccagtttttctaattcaaaatcctatacattttttttcacttgtctcaacttgaaaaaaacagcaatggtagatgttttccagggaaactggcatttgtagatattgcagccaatttgtgtgtgtgtgtgtgatgttacatgtccattcacaagtggacacagttcatgttttcactcagatgcccatctttaactctttatccaacttcaattgccttgcctgtctctttacattttaattgatcagtaaatacaaccaattctgattttgaaaattgcctcagccttttcaggtcttcatttcctctgttatagaggaatatcatagaggtaaagtgctagtttcctaacaacatattaaagctacatacagtcaacatgacttgttgatattgaccttggtcacctagttaaggtggtgttaggtttttccactgtaaatttactatttttcaactctttccatattgcaccctttggaagaaagtcactattaacagctcatactgaagaagtgagttgttttgattatttggtattcttctacaaggcagatttgtttcttctctactacctattcaattgtgtattgatatctgtatggactcagacattgattttataatttggaccataatccaatgctactttgtttgctttgttgcccaaattgttctagctatggacacttggagctttttcagtttgttcctcggaccctttgacatgcccccatcattgtgggttttcttttcttccttttttttttaggactttctggcattataagatatagccctagattcaacttgcatatttcatctatttttaagttattaaatagcatttactttgtgatcccatttggggaaatacatggaattcagatgcatgtattataatatggaataatatcaaacattaatagtggttatgctatctccgggtaatcgtactattagtgatttagtttttctctttatgaatctttatttttattatgacatattacttgtgttagaaatcaataatattggatgatcagaaaggaaataaaaatattctgaaggcaataataacttatttataaatcagtgaagcctgtgtctctagactgacaggacatgaggcaattttagagtggcaggtgccctctactggtcagctgctcaaaccctctatagactaagagctgcatccttaaaaacaaaagcccaccattttcttagcactgatatctcaggaggtaaaaaagtacttgggcttttgctagagattacatagctacatatctgaggggtcactacgtgaacttaaaaattgactcctataaatgtgaagtctgtactgtggattgtgaattagaaatggatatgtgtgagaacaggcctagaaaaatatcacacatgctgacttgccaatgttggacctcttgagtctaatctacaaaaaaatctccttggatgagaatattttgttcatgacctctctgctgagaatgtgaccatgtctgctacagagcttaaataaataatgctgagactattcattacaaagctcccaaggagaaaaaaaaagcaatttattttatgtactaccttaattaagtttaaactgcctagtgtgaatttttgatgaagaacaaagatataataagtgattttgcctagggaagctcatgtgctgagtcaatacttattgagcacagttctcttttatattagatgctgctctaagaagctgcgtgcaatacagcatcagatgttgcagagctctgcatatggggggcttgcacttgtgagcagaaacaaacaataggcaataaacttgataaatgagtaaatgacttgattggtagcaggcataaagaaaaccacagtgtattaagggccactgggaggagtaggggtggagatgcagccagcttgctgtactaagagaagagacagagtaggcctctttaagaaggtgatgtttgagcaaactagcaatacataaacaaataaaccttaaaattcttttttttaaattctgagagtcatcttttatataacaaactgtagttatttctaattcctcctaggataaaatgaaaaaaatttaaggaggcctccagggctttgtagattccagcctcagcttggttctccagcccatttttaactagcccctctttttgtttactctgtttcaagcatattgatttttgtttgtttgttttacttattttctttaatgaccaaagccattcccaactctgaatctaaacacctttttcctctgccgggattctgcccttgccaccattcctaccctttaactctcaattgaaataccattacctcaataaaaccttttccgggtcacaccaaccatctcaaactaacaactccctgaatttcaccttccaatgttaccatggttatatttaaattcctacgtagtgaattttgtcttctcccagcctctagccacactctactcctggaccggaagcattttgagatcaggggcttcatcttgactgtcttcccagcacttcgtatggtagctcatagtagtcgcttaatggatatttgttgaacaaatgagtcaaactttttgtttagttccctgctgccccatatggataaccttgattatctgaacatttaggggaaatctcatggaggcacccttttatagtacagaatttccctcatgccttctttgctacgaggtaaatttaaatcatgggtgcaaggagtcagacatgacagaggcagagattcttgattcaacaagtatgtatgtctattttctcttagaagctcaaacttttgtatgttccacactttatatcacgcacaatgatggaattatgggaaagtgaaacatcgtagttttgattatagtggtgattaatttggcaccggtctcaaagccgaaaagagaaagggggagaagaatggggagagtccctgaacagctgatctatgctgccaaaagacgcagcttctcaaattacttggaggagccagagatcccttaaataaaaggagaggtgtctaggtttgtgcatttaaagagacatattcctttaaagcaaatttttcagcgctgactacacattagaatcactaggaaagattttatgaatacaggatatacaagtcataccctaggtcaattatatcagaatccctagggccaagacctaggtattgatggtttttaaaaatttctcaggtgtttctaatatacaaccaaggttgaggattactgatttagataaaagcaatttactctgttaatatgcaaatatctctagatgaggatatatatatatatatgtaaacagtttaaatataatacacgtaatacttataaataaattaaatagaaattaaataaaatgaaatatcagattctttctagtttacctggtcagtaagaaaatgtttttgatgaggctagacagggcgctagtgggggagagaaagttctggagcactctttctcaattgggtagtgaatggctgggaaggattaggaaaagttctaggatattagtaatctaaaagaaaacagggcagagtatggaggggatgtggacagaaaaacctgaagttagagatgaccatgtatatttcaacattccacaagtatatctaggtacgtactgaatcccaaagagaatggggctctcaaagtccacgggctggagaaaaaaatttttgtccccaaagggtctgagagagagcagggagtaaaattgtataaaaatctgtttgggagaagaagtcattggggccatgatcataaagctagaaacaaagaccttcaatttatgtaataattaacagcagtgacactgtgcctgtaaagtaaatagaattggatgcaacacacacacaagatggtgaagcttgttttgagaaatctatgcctcactgaattttatattcttgaaagacattttcatcagtttagatacttgacttcatcaactgattgactttcacttaaatgttactcttaatgcagactctaaccaaaaattatgaccatgtggacttaattaagtctaaagtgtttaaaaattatttcagactcgaatcatctactatattgttcataccagtaattatgattaggcaggaaatttaagaagactattggaatatgagaagcaaggaaggtaacgtctcccttatataaaataaataaacttggatttgagattccctaactgtggacatagctagtcattttgatagaacaagttccagttctgccacactggcattcttggtaagtaccacatatatagcttttaattttgaacaaatactctggtagataacagttgcttctcatgccagttcaattgaattagacccaacttggcttcataggtgcaactgaggattaaggatggcaagatctctctgacatcctctgttatttaatgttgcctaagaaaggaacatggggccaggtgtggtggctcacacctgtaatcctagcactttgggaggctgaggcaggcagattgcctgagctccagagttcgagaccagcctggccaacatgacgaaacctcgtctctactaaaaatacaaaaaattagctgggcatggtggcaggcgcctgtaatcccagctactcaggaggctgagtcaggagcatagcttgaacccgggaggcggaggttgcagtgagatggtgcggctgacctccagcctgggcagcagagaaagactctgtcaaaaaagaaaaaaaagaaaggtacatggcaagcctacataccaggtgtattttccaatagtatttctaacttgaggcagctgagctcacattgcacataacaaaattatgaaaatgacaaaatggaagctgaactcagagacatcaggaaacagatacttaaatattatcagaccttactctccatcccatatctgcctctcacttgctatcaacttgaccattttcacctgtggcttcagaggataatgataatatttacttaatttaatgtctcctattacaattgggtcagatgttttatgcacttaaaaacttactggcatccatttcatgcaataaatttaacaccagattgccactcaaaagaaagtatcaattaagctggaatatgtcagcattggcaatacacagatcaaacaaaaacacaaaataatttggcttacactctctgcctgttaaagtaaccaatgaaactattttcctggggaagcttttcaaagtatttagcctgtcacaaactggccctttgaaactgtattcccaaagacaagttgtagaacccagacggtcattgagaattgttgagcctggagggtgagaatttgtgtccaccacagtcgagaatcagaaaggaggataagatgaggagagagaagaaaacaataggtaaagtctgtgtagtatggaggtgtgtttccagaggatattgaagagcaaaggaaacacagggatggatgctggaggccactactatggactgaatgtgtctccccaaaattcatatgtcgaaatcctaatgtacaatgtaatagtaatttgagatgggcctttgggaggaatttgatcatgagaggagattccttatgatgagataagtgcccttatttttttaaaaaggacagaaaacagcttgcttcttcttctctgcctctctctctctgtttctctctctctctctgtttctctctctctgtttctctctctctctctgtttctctctctctctctgtttctctctctctctcactctctctcattctctctctgtcccacatgagaagacagtgggaagatagccacctatggagtggaggagtaccctcaccaaaactgatctcagatgagactggaaccctgatctcaaactgccatcatccagagctatgagaaatgtttgctgtcgaagtcacctcgtctagggtaatgtgttataacaacccaagctgatgaagaaagccactgtctgattagatgggtctctcctaaggaattggtttcttgttaggtaatgtaccctggtatcaagatttggaaaacagtgtaaatattaattcaaagtaattatttgagctgtgctggtaactagacctactagagtaattctggctcaaatagttcttgtgatatgccctgcttattcttataaggattgagaagttgactaaaatttgtccattatttattaccagtgaactctggtatttcctgagggtattttctcaaacctactcgttccttccaggcctctgccacttgctcaatgtagtatcccagctctctgtcactttccatgcctcacctcatgacgctgcttgctagttcagcctccctcctggcatgggccagacagcagcatattctccttacctgctgtcatgaaagctgtaataactgcaatgcccagtgcaaagctacctaaacccaggaagaatctggcctccccacttactttcaaggtgggactaggtaacacagtccagaaatgttgaggatttcagaccattagggtatattcggccactgagagtcaggagaaattgaggagccaacaaattatgtcttcacatttactcactctctcccccacaggatcactgtggagaaggtgttttcattggcctctgcacaggcaccctgcatcactcattagtcagtcgagcttcctggggccagctcagtagcatgccaacttgtatgtgattttcttcccctcaaccttaatgacctggtactgcacccattcctaaagtattagcacacaagctttcctttaggctctgttggttaggggctctttgactcattaccccttctaccccagctcacatacactgttgccctgccaaataacatgtttatttcagtgatgtcagcaggaacagacattcatgtccaactgtgttgattccttcttttagtctatcttggaagtagcgaagaatttctgctctggggcctctctttcaactgaggacacacatcaagacacagctgttgcaccagaagctgtaattctgcaggcctgccaactggcacattccatcatataacaagaattcttgggatgtggaatccaaaacactggccagagacatagcttaatatcactacagtggtgtgggatggagtaaatattagtacttgttttattttttctggtaagtagaaaattggaaatggtaccctcttatagtttcttgccaaagatggatgttggctttccacaaaagtgtagagctacacaagccttaggattctgttaaattaattctaaatatctgagaagaaaattactaataatgtgtcatgaattagtgactcccaagaattgaagtccacaagaacctcagaatgtgattctatttgggaaaatgatcttttcagatgcaagtaattaagatcttcagatgaaatcataattctgaacttagtatgggttctaactacaaagactgatgcctttataagaagaggaaaaaacacagagacatagaggtgaaggtcacctgaagataaagacagaaattgaagttatgctcccacgagccaaggaaggttaggggcccccagaggtacaagaagaaaggaagtattctctccttcctttggaaagagtgtggccctggctatattttgattttggacttctaacccctagaactgtgagaaaatacatttctgtttgtttttaaatcagtttgttgtattaggttggtgcaaaagtaattgtattttttaccattacttttaatggcaacaatcgttaattactttcacaccaacctaatacattgttaaggcagaccaaagtattagagagaccccaaaatcagcagcagaaaatgtcagcggtctaagagaatgaagtgaggagtgagaacatacacacggaataggcacgaatggcaaaaatcttgatgctaagtcgtgtttttggatgttgcattacaaatacaatgagcccttatcaattaaatgatgggctttctggtactattgaatgacatcagtttcttttacttgggtatattaacttccttaactctacatgaaaaagtctttgcatatctagaatatttcatcagggagtcaaattgtctcctggatataaacatcaacaaaccaaaacaagcttacacaagtggaaagcttgacattgttgaagaatgagtgacagaacctcaaatgtttgaataatgtttcattcacagctgttgtggcttctatctagttggcaaaacatgtaagtctagccatgagctacctaccccagtctgagaaaattattttaacatctaatggcccttgtcatgtaactcctcaaggttatacatttttccattgattttaccatggaacctagagttatcaagaagttaagaagggaaatagatataaatccacttatctttaattaaaatttttcctaaaaatttttgatataggctttttgtaacaaactgcctttaagtaggtttttcacaacaaaagtctactcatattcattataatgtttattatgagctctatgttattgccttaatgacagtttcttgataacggagaattttcaaattaggtaattttcagaattagttgtgtcacttttatatggaagcacacttgtttgtaaatagttaccttcactcaattaaaaggaccatttgagttcatttcaaactaactgaaatgatgatatatttagcaggagtttattgatcaaatgcatggacattacagttcttacttgactttaatggcaaatttcaacttttgcagaatggggttactttgctttggtaaacttttctgatcagagaacattggtttgaatctcatggtatttttcagcagttaggctatgcccacctctgggaaaatgtaccagtttttttcatacagctcattaaaaatataaatttaaaaagcatgtgtgtttgggtactttccagggattgagtataaatgcatagttttctaacaattgaaataaataaacaagggacaatagacacaggagtactaaccaagccgctccttagtagtgtgacaatatttctcttttcctctttcttagtctccaagtaattctaacacattatctttctaacgctcactcctagagtcatgggacttctccagtcatgggtcattatttcaaagatgagataattcttcaggaatgacttccaaagtggttttgcctcaatgagtactctgttgaatcattaacataaggctaagcattttaaattttatgtctcatgaattccacaatgagaaagtaaaggagaaattacttattgtcaaaaggaatgagattttgactataataattatcttctcaagacaagagaatagaatataaaatttacattttaataaaagaagacagatacagaatataaagaaatgttttataaataagattttagtaagaatttatattttaattatattttaagagaaaagtaagattaaataactggtgattgtaaatctgtctcttaaatcagtgttcctcaattattttatctaaaaatggatatcaaacttatattaacaacttaattttacatccaatagggaaacatacaatttaaacttttttacagtaattttaaagataaatatataaacgggctttggcactaattatttaaatgaaatagctgttctctgaatctaactgcattgaacattttcaaagccacagtatatattttaatttactgcatgtaaaattcacccagtcaaaaaataaaatcctcagttctcttactcaggcagctcatgctataggagagtcacagaagttaaaataagtataacggtttcacaaaagatgtagggtatagaataaaagaaaagccttacagatgggaactgaaatatgaaaaggagtttctaggtggaaaaggaaataaatgaaggtcaaaacaaaagaataaaatatgcaaaggcctggaatcataaaacagtatagatcattctggaaaggcaagaaagagagaggtggagacagcgatagaatagagacagagatggagatgaagatggagatgggagtagaggtggaggtagaaggagagggagtggtagagctagagatagagatataaatggaaatgaagatggggtagatagaggaagaggtagaggtagggatagagatggagatggagacagagatagaaatagagaaataggtagagacagagttagatagaggaaaagtagaggtagattgagaaagaggtagaggtagagaaagaaatagcattagcaatagagatggagatagaaacagacatgcagatggagagagagatagaggtagaggttgaggtacaggtagaggtagaaaaaggaagaggaacagatagagatagagacgacagagattgaggtagaggtagagacaagtagaggtagagtagagacagatagaggtagaggtagggatagggatagggatagagatggagatagacgtagagactgaagtagaatagagataggtagaggtagagtaggggcagaggaagaggtagaggtagggatagagatagagataagagataaaaatatatagagatagagatagaagtcgagattgaggtagaggtagacagaaatagagacagagttagagataaaggtaaggatagacagtaagagaaaaaaagagacaacacagagacagagagaatttccatgtgtgtgctcacatgagtgcatgcacacatgtgcgcaagtgtatgtgtgtgtctatgtgtgtttgatggtcttttttccacatattagggagttgaacattaagatgcaagacactgggagttagaggcaagagactctaaaaggaaactcctatcacaatgctatcaattttaggaaggtaatattggcaatagaattttctgtagaaggtggattcccctcctcctttggatatatgtttattagattcaacgaattccataacaagaagtagagaatattactcctcagagattggtgtgaaattcaaactcccaaggtattacagatgcaatgttactggatagagctatggtgaccataaaatttatcatccatactggatacttatgagagcaatttggcactccaacaataattaaaactagttgatttttgaaactttttgacaaggaaattgatgtttatattagtgggcatataaaataattttctattataaacaattttcaaacagaaatatttccaaaaaacatacacacacattaaagcaaaattaaaaaaaatataaacacaataattttctttggtacatagtcacattcttaactatacctgatctagatataactgtctccaaataccaagtcactggaatttttttttccaattttcagttatgcttttgagattatacggtattgtccagaattgttgtcacagttgaatttaatgatttaaaataacattttacctgtaagacactaacattttttaactgagaaaacactctgtctagaaaaactcagtaatatgagaattttctcaagtatagtgttcacttcatattgaaatgtcttaatatttcagcctaaatattttaatatttagtagttttcctgcctttaaatgtttttcaacaaatattttgaaaaacaaaactcatcattataaatcatctttatttatgttctttttattaaatgctgaaaaatgatagggtttttatttcactcattagctttttcacaaatattttgttgttcagttatactcagcatgtatacaatattagtcgattttggataaaatgtaaaaatgttgaccatgccaaaaagaaataagtcaaacttcagtttttaattgttgtaatatcagaacttaataggtatgcataccatatgcaaaccataaccaaattcaaatgaagtccatttctattccatgtctttattcaatgctgagaaatgtgagcaattttcaatttcaatctatgatagtacagaatataaacatatttgatgaaaactaagagccccaccagaagttcttctcaataaaatcctcaataaaatactggcaaaacgaatccagcagcacatcaaaaagcttatccaccatgatcaagtgggcttcatccctgggatgcaaggctggttcaatatacgcaaatcaataaatgtaatccagcatataaacagagccaaagacaaaaaccacatgattacctcaatagatgcagaaaaagcctttgacaaaattcaacaacccttcatgctaaaaactctcaataaattaggtattgatgggacgtatttcaaaataataagagctatctatgacaaacccacagccaatatcatactgaatgggcaaaaactggaagcattccctttgaaaactggcacaagacagggatgccctctctcaccactcctattcaacatagtgttggaagttctggccaggacaattaggcaggagaaggaaataaagtgtattcaattaggaaaagaggaagtcaaattgtccctgtttgcagacgacatgattgtatatctagaaaaccccatcgtctcagcccaaaatctccttaagctgataagcaacttcagcaaagtctcaggatacaaaatcaatgtacaaaaatcacaagcattcttatacaccaacaacagacaaacagagagccaaatcgagtgaactcccattcacaattgcttcaaagagaataaaatacctaggaatccaacttacaagggatgtgaaggacctcttcaaggagaactacaaaccactgctcaaggaaataaaagaggatacaaacaaatggaagaacattccatgctcatgggtaggaagaatcaatatcatgaaaatggccatactgcccaaggtaatttatagattcaatggcattcccatcaagctaccaaagactttcttcacagaattggaaaaaactactttaaagttcatatggaaccaaaaaagagcccgcatcaccaagtcaatcctaagccaaaagaacaaagctggaggcatcacactacctgacttcaaactatactacaaggctacagtaaccaaaacagcatggtactggtaccaaaacagagatatagatcaatggaacagaacagagccctcagagataatgccacgtatctacaactatctgatctttgacaaacctgagaaaaacaagcaatggggaaaggattccctatttaataaatggtgctgggaaaactggctagccatatgtagaaagctgaaactggatcccttccttacaccttatacaaaaatcaattcaagatggattaaagatttaaacgttagacctaaaaccataaaaaccctagaagaaaacctaggcattaccattcaggacataggcatgggcaaggacttcatgtccaaaacaccaaaagcaatggcaacaaaagacaaaattgacaaatgggatctaattaaactaaagagcttctgcacagcaaaagaaactaccatcagagtgaacaggcaacctacaaaatgggagaaaattttcgcaacctactcatctgacaaagggctaatattcagaatctacaatgaactcaaacaaatttacaagaaaaaaacaaacaaccccatcaaaaagtgggcaaaggacatgaacaaacacttctcaaaagaagacatttatgcagccaaaagacacatgaaaaaatgctcatcatcactggccatcagagaaatgcaaatcaaaaccacaatgagataccatctcacaccagttagaatggcaatcattaaaaagtcaggaaacaacaggtgctggagaggatgtggagaaataggaacacttttacattgttggtgggactgtaaactagttcaaccattgtggaagtcagtgtggcgattcctcagggatctagaactagaaataccatttgacccagccatcccattactgggtatatacccaaatgactataaatcatgctgctataaagacacatgcacacgtatgtttattgcggcattattcacaatagcaaagacttggaaccaacccaaatgtccaacaatgatagactgcattaagaaaatgtggcacatacacaccatggaatactatgcagccataaaaaatgatgagttcctgtcctttgtagggacatggatgaaattggaaatcatcattctcagtaaactatcgcaagaacaaaaaaatcaaacactgcatattctcactcataggtgggaattgaacaatgagatcacatggacacaggaaggggaatatcacactctggtgactgttgtggggtggggggaggggggagggatagcattgggagatatacctaatgctagatgacgagttagtgggtgcagcgcaccagcatggcacatgtatacatatgtaactaacctgcacaatgtgcacatgtaccctaaaactgaaagtataataataaaaaaaaaagaaacacacctgcaactacatgtgttaaatttccatcttgaatataaacttactaacattaacatacaagtaacttttgcagtagttgctgatgcttcttcctcagagttgcatcttttgattttcacatagccagtgaaactactgtggctcacagagtagacgtgactgttacagcatttatgaaaaatcaatttgtatcataaactttttttttttttgagacagggtctcactttgttatccagtctggagtgcagtggtatgatctcgacttccagggcacaagtgattctctcgcatcagcatcctgagtagctgggactacaggcacatgccaccatgcccagcttatttttgcattttttgtagagatgaggtttcaccatgttacccaggctggtcttcaactcctgagctcaagtgatccacccacctctgccttccaaagtgacaggattacaggtgtgcaccaccactctcggctatcatcaactttcttgagaaataaaaattcagcctttaacattttattatatatgcccttcattgcttacaactttgctgctttaagggtttaccgcaaaactaaaaaccagacaatgtcattaatgaacaataccatatactctccctagcactttccatgaggcgacccaaagtggtaacaattaacagttgctgtgtatgaaacggcctcgctcaggaggaaacacggcccctcagatgaactggtaagtcaaaactgtgaaaggtctcaatttcagatttgaccataattacaagactggcataccacaatttcacatgtgtatactgagaaaaggcatcagatccctggatcagagacacaggtgtttttttggtaacaatagaagccacagctggcttctcttcatcacttccaaaacccccacagagtgacacaaattgcagctatatgttcacccgtgcatgcaggaggtcatatcacagaattagaaccccaaaattaagagaatctgatttttcatcagagtttctggtgaccaatctcttccttagagacagattacgcatgttaaaccaagtttagactaaaactgcctccttacatattttaagtttgaacgaaaggtttttgtgtacgtagtgaacaataacaagtggagctgtggtaaacagaccgtagcctacacttgtgccaatcactgagttttggccagtcaaatgtagccaactgttcaaagcctgttcaaataaggcaaacaccaacctgtaaccaattcagctgtttctgtacctcatttccgatttctgcacgtcgctttcctttttctgtccctaagtctttttccaccacgtggctgcgctgaagtctttgagcctaggctggctcagaaggctgtcggattggcaaaccgttctttgctcaattaaactcctttaaagttaatttggcagaaatttttattttatcaggtagtgtcaagttaggcagagggcaaaattgcacaagagaaaagggtgaatggcactaggtacatctctttaaggttgtaggtatgggtgctactgaggtaactatggaagtaggaggaacagaaaatggaacaagattttagtttacaacatctgtttcaccttggaatataaagaaaagtcatcccctaagatgtgatggctgtgaaaatatagctgagacctaaaataaactggcaaaaatttgacacggtggttaaaggtgttatctcagaatagtgaacttctctattgcaatcactctattgttgttgtaaggcaaacattccttttatcctctttgagccatattctttcaaaggaataagtgttatacatgcaactataattaaccaaaatgaacccgctgttattccttggagaattctgtcctatatattccacatattgattttttctgtgtataatttgggcctttaattacttcatcaaaattacctattggagtacttaaattattaaagaaacaaaaatatccactggataaattacctctactttaatggaaacatatatagagttctagaaacatctttaggtcctacaaaaattttattttactttatttattttattttattttgttttattgttttagaaacaaggtcttgctctgtagcacaggctggagtgcagggccatgatcatagcatggcattagccacagtggctgacaaatacttttaatgaaatgaaactatatttctgacatgaatcacacagtggttatctgatattattataagtttaccacatccattagatgaaatatgacccattcattctttggctaaatgcaccattctttgtctatagagaaaatgtcatatctgaaagtttcacgtcctagtttacaccacttgactttttttttcctttccaacttttatttctttttcttgccttattgtgcttgtcttgttcgattttctttcttttttttttattatactttaagttctagggtacatgtgcacattgtgcaggttagtttacatgtggatcccttccttacaccttatacaaaaatcaattcaagatggattaaagacttaaacgttagagctaaaaccataaaaaccctagaagaaaacctaggcattaccattcaggacataggcatgggcaaggacttcatgtctaaaacaccaaaagcaatggcaacaaaagccaaaattgacaaatgggatctaattaaactaaagagcttctgcacagcaaaagaaactaccatcagaatgaacaggcaacctacaaaatgggagaaaattttcacaacctactcatctgacaaagggctaatatccagaatctacaatgaactcaaacaaatttacaagaaaaaaacaaacaaccccatcaaaaagtgggcgaaggacatgaacagacacttctcaaaagaagacatttattcagccaaaaaacacatgaaaaaatgctcatcatcactggccatcagagaaatgcaaatcaaaaccaccacttgacttataaatgacattttacttagtcgtgtttattgtgagtcatctatatcaaagaactattgttataaggtgttttacacattcctatcgcacgtaaaaagaagaagtggagttagaatgcattccatgagtatgcctcgcttttaagtatgtaattatgagctgcaaaccatgaaacactgtctatgacacatctttaatgatacattttcagagcagtacatcatagcaactgtgagaagttaaagctttaaatgaagtcaattctataggattcttctttatattaggctttgattgtcaatctatgtatgcaacttaaatactatatatacatacatataaaaacatacaccaactatacaaattagaacatgtatataaactatataactgtatttagtattaaagttatttacactttgacagcaaattgtttttaaacatacgtgaggttatatctgtttctttgtatattaattaatatgtgtgtatagatatattattttaaaatacagatatatatgtgtgtatatatttttttctttaaatttggttggaaaaactctagaaatatgtattttaagatcagagcataaagaatttctataatttaaaatattacaaataaatagcatctgtagctttgctggatatgactaaacatttcaataactctgtttttgtatgattctataaaaaataattaggctgagtgccatagctcatacctgtaatcctagcactttgggaggccaaggtgggaagattgcttgggcttaggggttaaagcccactctgggcaacatagcaagaccttgtctctacaaaaaattaaaaaattagccaggcatggtggctaatacctgtagtcccagccacttgggaggctgaggtagggggattacttgagcccaggagtttaaggctccagtgagctaccatcatatcactgcactccagcctgggtgacagaataatagaataattgtattttatcatttttaatatgtttgctgtcccattttgaatacatttcattttaattcatttcttgttagggatgttttagtgggcatatattatttgaaccacttagcatctattcccacttcaaatggaaatgctctgattgacctctcaggctccatgacttggcagaagtcattgataccctggtcttgggctgggctgattactcagtcctaagcaatcaaaggattgcaccttccttacctaacgcagatcagggccaacaagaaagggatcgtgaggctaccaaatgcagatcatacactgatgctcacacttgtggtacttctaatacaactgctaaactaaaatgtatatttattgttaatatttctttcttttgtgaattcatattcttcaacctaattttaactgagctattcatatcttatgagtattattgataaggtatctccattttctcagtctcatgtttctatttgaagagaatttcagtttgaatgatattcctggcttctctctccaattataactcatttttctccatgggggataatatgacttaactaaatggtatgtttgagagaagaaactgagcatacttaaaccaccctctttacctcagagctagaagtgttggagtggggcacactccaaaattattctagaataatttttctagaatacatttattggttctcaattgttgtgttgttacaaactgccacaaaactgaatgcttaaaacaactattaatatttggctcacaaatgtgtgtaatctgccattgtggctggggtcagtagtgcagtttttttctgctggtttttgctgggctcactcatacatctgcagatagttgacgtgtaactaagtaacctacccctgttaattggctagctattggctgaggtctggaaaaatgtcagaaaaaaatatattattattctgagactgggagagcagagaaaaagctgttctggggattcagatgatgacaccaagatagctggcaaaattatcttataaattttgccaagattatttgccaggtagaacatggacagtgtaatttcgcttattttgtttcctttaataagaaatgaagcaaaagagatgagctgaaggaattatttattttgtgatcagaattttgaggaaatatacagggaccggttggacagaaagacaacatttcttctatccttagtttcaaaagcggctaaaagtttcttaaaataaatgaggcctgtggccaaaaattattcaaacatggatgtgagactctttaaagctcagaaagattttgaatctgatagaccatctcaagctagaagaatggatttcaagactctctaggcctagtcccataacagcccaacacttgcccaaagtagagagtgggctttttggaaagcaaatgtagatatggctttatttttttttctaacatactagagtataatccattgtttagaaatcccatgaactcttcaaaagaatttatcagcgaatcaaagccagttcggactaaggagctggaagttctcaaattgaaaataggtttccgggccaccaaatatctttgaaaagaaaactggatgagaaaactctttagctgctgacacaggttggttctcagggaaaaggaaaacagatcagaaggaagaacccaaaatccagagggtttagctaagatctacagaatttgtaaattattttaaactgaatgaaatcatccaggtgccgtggcatgtgcctgtagtctcagctactcaggaggctgaggtgggaggactgtttgaccccaggagttcacggctatactacagtatgctcatgtctatgttgtcactgcactccagccggttgatatagccagaccctgtctctaaaaataaaccaaacacatgagatcaagcttaatagtctaagagctatgtttatttatttataaatttgcctacctgggtgcttcaatagtcaacacacaaatctggcaattctctataagagttctggtcatttaagctttcttgagcttctgctgtagatagtgacatgaagtctgcaaccattataaccaactccaatttctaaagattccatgtctttttttttcccctatgtattcccaaaagcttgagaatttcttgaatggctcattttcaatgtactaatgggagccaaaagatgacacactagctattgggtttggacaattattttagttgaagttagaccgaccaattttctgaatctggtggaaatctcaggcactaggaactctggggatggaccaccattctttcatattatatttctgaagctcttagccaaatagcaagcaatctctgagtcataaaattacttgaaatcctgttttggttatttccagtggagagcaggccactgtagagatatttaggtacaatagtatctggtatctgtcaattgattatgtgagcagaggtggtacagctttggtgaactgggctgctgagcgccagatcgagcccatggccgtgaagcagggcagttaagagccatcgtaggggtgggtctctctagtggcagaagcaaattgccaaataatagtttgtctgagagaggagatctacagggagatgatactctagctatgatggcaaaatcggtcccagttagaatgacagtgcagagataatgaccaaatcttctgctgaggctgctaccaccaaggctaaaggaccctcttcaactgaaatatttaaaaagaatgattgcacgggaatgaaaacctcagaagttattactctttaacatatttgcaggaagttaaaggaagaggctaatctcaatgccaatgaagaataatccattttcttttctttccttttctttttttttttttttttttttttttttttttttttttttttttgagacggagattttttctgtggcccaggctggagtgcagtggcgcgatctcggctcactgcaagctccgcctccctggttcacgccattctcctgcctcagcctccctagtagctgggactacaggtgcccgccaccacgcccagctaattttttgtattttcagtagagacggggtttcactgcgttagccaggatggtctcgatctcctgacctcgtgatccgcctgccttggcctcccaaagtgctgggattacaggggtaaaccactgcgcctggctgaataatcccttttcttaagagcatgacttcaattgcagcctgaaatctggccagggtacatgagcatagccccccttatgattgtaccctgcatctgatacagaagattctcaagtgtcatcaatcttctaaaatacaaaaagattttacgtattaaaaagatgaattacttttatgtctttaaaagcaacaatgctgtttggaggcatctgtttttagaaattctgaaatcaatctttaagctagaggtagaagcaacattaacaaatttacgattagggagtgagacaagaattaggtttagataggataatctaaatttcttaatatgggttaaaaaagactagtcacaagaaaaacagggttaaacatattcctttataacttttaaaattattttaagtattagcaagcaaaaggaaaagcaatttatgataaaatcatcagattagcagtaaaacttacttttcaagtttgcgttattcatgggggcatattcgcatcacattcctttcattatgctcaggatagctgggcatggtggttcatgtctgtaatcccagcactttgggagaccaaagcagtgggatcacttgaagtcaggattgattggcacccagcctggacatcaaagcgggaccttgcctttgcaaaataaaaataagaaaattagcttggtgtagtggcatgtgcctatagtctcagctactcaggaggctgaggtgggaagattatttgagcctaggagtttgaggcttcagtgagctgtggtcacaacactgcactccagcctgggtgacagtgtgaaaccccaactcaaaaaaacaatattaagatatagatattgcttaatgtcttttcatttcaactttgataaaacaacaaagcaaataattccaaaatatatttctcatattaaaagtgacctgcccccattgaaagaaatgtatcatgttttgttttgctacatgcatgcatttgttgcatcagtgaaacacgtgaagttactgcagtgaggtgtgaacgggagcatgagttactcaaaagaaattatgtgcaaaaccatgtatactgaggcctttgtgagttaatttctttttgaagttggctgcagaactttgtggtttggtttccattcagtaaatattcccagtgtttacataatgccaagcaaagggacacatgttgtggaagtttgttagagggattcgaactttaggatgaatcttttagtggaaattgaaaaacaaacaagatttatcttaaagaagtatatatttaatatatatgaaatacaagtaatccgatgtgcagcatattcattcaatggaatctttctttgtgttgttttaagagtatttacaaaaatgaaagaaaaactgcagataagttttcttttctttataatcaggagcaatgtttaattatttatgaaatctaaaattaataaaaatatatgcattatcttttagaacaataattataatggaagctatgttaccatttacattttcttttggaaacactttataatcattatgggttttgggaattttcagaggcactaatgcatcgtcagtattcggtaattctgaaaaataaaagtaccgacattaagaaatattcactgacatgtggtcgattctcggatatgaatccgatggtcctcgaaacatggaaagtctgctgtcacgctgcacgccacatcctgtcagaactggagtcacactacaaatcacttaaatgaggctggaaacctttccagacaatagaatgtgtaactcttgaaaatgaaacagagtgactggatcactccttggtcatcatcacactgaaataacattcagtgtttagcagtgaagaataggttaattgtaagtgactggaatataaggttacaaagaaaatgatttagcggcaatatgtagtaaaaaaattctctttcaacagcaagttttgcaatttcataatttcaaaagggcatttaatgaaaaggtttcctcttatcctggccacaattcccttctttagtggtgatatttttaacttcttacagactctttcagaatatgtatatggttatatgagtaaagttaaatatacactcttagtttctccattttattacacaattgtatgctcacatatatgatatatattttatatattgttatatgacatatattttatatattatgttatatgacatatatattatatgacatatattttatatattatgttatatgacatatattatatgacatatagtttatatatatttgatatgtattgtactgcatgatatatagtttatatattacattatgtgacacatattttatatatattatattatgtgacatatattttatatatattatatatatataacttttagaacctggctgtcttcttttattctgcaatcaatatatctaacatatccttctactttaatattgaaagtttttttccttgttaataatcatatttaatatttttatttatttaaataaacacatacatacatcatgttcatttactcagatgacaatctaagtgtgatattagtttatttaagcagttgtttttgatggataatcactgtccaaaccttgactaggaaaagaaaatggctacaacgaatacccactatgttccttattgtacacatgtgtgagtacatgtttgtaagatacattcttaaaaatggcactgccttttcatagactgcatgtgtcttcaatttcagtagctattgcctagttaaatatgttattgatctttcagatttttgccaagccccaaaggtaaaaaccggcagtataaggtttttctttccttaattttaaccagtatgattgatgctaagtctgtttaaaatgaattagaacatgaggttgaccttgatgaagacaaaagaaaaaggaatatagaaagagagaaaggaagggagagagggaagaaaaaagagaagaaaggaacaaaagatggaaggaaggaaaagaaagtgagaaagggaagagagaaggacaggaaacaaggaaaaaagatggaagaaggtaagaggaaatgagaaaaaaaggaagagagagagaaagaaaaagagaaagaaagaaaaaggaggaaggaagaaagaacagaaagaagggaggaagggaggaagacagtgctgtggaacatattccaggtggctgtgaaagaataaaggggatccagatgaagcagtgaacacatatgtgcaacagggagtgtgtttcagtaaatcagtggcagacaatggagtttagatccaatgcattctatcatcactagtgaagtgtcctgaacagaaacactcaaggatgagtttagtattgtatttcagaatttatggaacaagatatatgcagtgaaggggacctgtagcaagagagatggttcagctgacatctacagccatcttgacctaaggtgatatgtgtgatgagagctaaaaagcaagcagtagatactacaatttgattctatataggagatgaataaataaatgaaacaagattttcaattatactattttagctctcatagaaagtggcgtttctgtttttatggaagtaaagaggaaccggcaatataattagttgaagaatgatttccctctatttcaatttaatttacagaggaaactcttttaaaaaataatttatagtatatttatctagtcaagagaatgattgaaataactgaatatatttggcaataaactcagggaaatttttaggaatctgtacccctcttcacctctttaatctctatcagtaacttcctcccccaactacccaaactaagtgtacaatctatatggagcgtttgaagtcactatgcacctatatagctttaagataacctgttcaacacctcctatcacaaaatccctgagttagagtcttagatatagaaattctggaaccaccattgacctgattatcttgagaggtatgatttgcatcatcttacctaactttggttttggcacgatttagaggtaagctctacgagggcagggatgttttcttgtgcattgctgttttcttagtatctaaaatagtgctgtggacattgaagatacactttaaattaaaatatcttgacacttcagtatttgttaaatagatctctgtatgttggaagtctaattgcacagtagaactaaggttaaggaggcattataaactaaaggaccacatgtctcactagaaaacaatgtgtattcaatttttcttaatgtcgtagtgacaactcagtgatctcaacggcgagttctgttctccctgcaggatcaagccctctgaatatggtttttattttttatgtttcttttttttctttgcaatgtaagtttcaagtatcattattctcatgtgttgaatattagcaatccagctgcttgagtcgatttaaaagcatttaattttgtttttctctcacagcttctgagcccaccgaagtgtactgcaatccatcaagacagaaaatcctgcattttgtggtccagagtatttggaactgatttagctgtacctggatccaagttgatttgccttcaatctcccagacttaactgttgaagtctatagcacattaagcatttaggtctacagagtcacagccattcactgacccggctctaattttcacttggagttagtactttttgatttgggatttgtgaaaaggcaaaaatatttgtcagacacccactgccaggaatgctgattttaatttcgtgacttctactgcagaaaaaaaaaaaaagttaattttcccacttggagtttttatccatggatatcaggctacaatatttcccccagagttatctttcctgcttccttcttttggcaaaacttacatggaggtgagtttcctcaatgtgggcagaaggttaaagcaataagaacttgcggttgctggccttccttgtagcctggtttctgaatgcatttaggttgatgtggcatcgtaacactctctagggcttacaggaaaacttcgttctgttccggaagctgctgtgagccagcggctatgaacttgtggcccagccacagggaatcaggaacttctgagttagagcccagacgccactgagcctcactgagtgacctcaagcaagttacttaacatttgcctgctcctcattttccagctgtaaaatggggaaaaaaaatatatttgctcattcaagttaagcagtttgcaagttgttcctaccgtactgtgggttaatttttatgcatgtttttggttttcattttttgctttgttttttcataacaaatttaaaaggggaaagggggtgtaattttattttttaaaagatgacacataaaaattgccacaattcgaactgaacttaaaagatgtcaagtatatcaaaatataaatgtataaccttttttgagctgtgctgtaacactcattagatattccctgccaattatagtgtgactgcaatgaagatgaagtttttttcatgttttctctctactgtggccccagaatttagaacagagcctgccatacaataaatgctcaaaatacttgctaaatgcatttaatgaacaaattaatgaatgaaaacataatagtccaagaaaattatagaaaaagtaagttcttaattttactatatatatagacatttgtttcctaattaagaattagaacaataggaaacaaaaacaataaaaattataactatcaatttatgatactatagaattctttattgactctttggctatctaaaaatcaaagatatctggggagcctacagagtttaagttaaaacactgttgtcccatacactttcataccccaaagaaccattgtttattaatacttttttttgagacagagtctcattctgttgcccaggccggagtgcagtggcatgatctcagctcattgcaacctcctcctcccgggttcaagtgattctcttgcctccacctcccgagtacctggtactacaggtgtgtgacatcacgcctggttactttttgtatttttagtagagatggggttttgccatgttggctagggtggtcttgaactcctgacctcaagtaatctgtccacctctgcctcccaaagtgctgggattacaggtatgagccaccgagcccggccatttattaattttttttaatgttacatattatttcaggagattgcaagagaagagaatcatatttgacaaaaacacataaaagaataattgcctagctgaaatatatatttttgaaatgtaaaaagaatgagaaattttacacaaaagaacatggtaaattaagcattgacataatgccaaacaaactttctaaaactcgtttcatttggtgacaaaatatatttttgttcttattttagaatattactttagcatttaaaaataattaaacattttcccattataggattaaaataatttaatttctggaattttctttttgttatcaattactgtggcatcagacagttgtttaaagagtgaataagaagtatgatagcagtttcactaaatggcaagaaaaaggtagctgaaaagaagttaaatacaaatttctagcttttattttatcacaatctttgaaggtattaaaaggaaaaaccaatacattgtagtagattagttttagattgaaatgaaagatttgcttattcttttatttgggaaaaaaagatgagtttgtcagagaattaactttttttatttcaatttaagagttaataggaacgcctttacactgttggtgggactgtaaattagttcaaccattgtggaagacagtgtggtgattcctcaaggatctagaactagaaataccatttgacccagctaccataccatttgatgccattagtgggtatatacccaaaggattataccttttgatgccattactgggtatatacccaaaggattataccttttgatgccattactgggtatatacccaaaggattataaatcattctactataaagacacatgcacatgtatgtttattgtggcactattcacaatagcaaagacttggaaccaacccaaatgtccatcaatgatagactggataaagaaaatgtggcacatatacaccatggaatattacacaaccataaaaaaggatgagttcgtgtcctttgcggggacataggtgaagctggaaaccatcattctcagcaaactatcacaagaacagaaaaccaaacaccacatgttctcactcataagtgggagttgaacaatgagaacacatggacacagggagtggaacatcacacaccagggcctgttggggggtggggggctaggggagggatagcattcagagaaatacctaatgtaggtgacgggttgatgggtgcagcaaaccaccatggcacatgtatacctatgtaacaaaactacacgttctgtatatgtaccccagaacttaaagtataattttaagaaagtgaaaaaaaaaagagttggaatgcattgtcaatgactcacttattgaaaataactgaaccaaggtaggagcttaggttatatgacgttgccattattgtttctaatgaaagcaaagtaattactctctttgatgtagatattttttagccatactctaggagtgaagatttctgtggacatttgttctgaatataaacaactccaaaaaattactcaggttcttgctaaacttcttttccttttggtgttctttaatgttcttctgaaggcacatagcagaaagcctccatttagtgctgagaactttaatgcccctcatctcccactaatctttttttaatgatgagaaggaatgtttagaatcactaaatccttgtaattacttttctattgctgctgtaacaaattattgttagaattttaacaagtgcaaatttattatcgcacaattctgcaggtcagaagtcaggtgggatcaactggatctactctggatctcacaaggccaatgccaaagtgctggcatgccagggtttttatctgaaagcttctgaaaagaatccatttccaggctcattctggttgtagacagaatccagtttcttgtgctttttgtgatcaaggtcccaatttccttgctggctgtcagatggggtttgcatttagcttcttaggggcctcactctaatctttgcatggagctcgatgcctcagccagcaaagtgtatcaaattcttttcacacttagaatctctctgacttctccttatctctgcccccaaacagaggacattctctgcttttaagggctcatatgattagattgggttcacttggataatccagaataatcttcttagttttacatcattcactttaattgtatctacaaaagatttttctgccatttagtatgatatattcacaggtttagagagtgaacatctttaggaagacattctgcccatcacattcttgaattcactaattgttggaactattagaataaatggataagaaaaaaagtgccctaacctagagatggcaaaattgaaatatttagaaaaaactctgtaatgcaatagacaaaaatttgagcaacctaccctgtaacgtaaaggttcagatccaaggcctgttttgatccacttttccaagatgctgatatcagatgagctcatctggaaataattagacttaaaaatcatctttgaattaaattaaaaatctgaaaactagaaaggataggatgttgcttaaatcaagattactaccagcccatataatggtcttagtttcattgtatggattccaaatctttttcaccaaataatttctttatttttttcttttttgcttctgtgctttatagttttgaatccagctgattagtttgaatcttggacatatcttgtttttgttactgttgttgatggtggttggttggttggttgatttttaactgcattatggtgagaaatctgcagatacttccaatttttcaggaatgttttgaaaaagcacttccactgtgctgccttccagttctcctcctcccagactgtccttgttgcttcttgaataaaccgagcttattctaacccttggacatggtttcctccttatggagggtgctttccatgattgtcattgactaactccctgatgttcttcagattcagtttggtcgtcatcatctaggaattctatttgtctacctaatataaagtatacattcacctattcaatgtcatgttactccatctcaatttttttccatagaaactgtcaccagctgacattttttatcatttacttatttttgatcgaatattttttcctatgtcctcctatagtagtactaatgaatgaatggataaataggtgcaagtatatcattgcagccttttatttttgaacattcttcaagacaaaatgacacagattacctataattccagatttctagctattgatacattagaacaaaagctgagaataaaatattttttgctttagttaatggatatgatataacaataacttaagatggtagcatctgtggctctttcgaaaacccactgtgattttccattgtctgcattcttcaattgtccccttagggccattattgagatccattctcccatgctactgccctgtatttggggcttacttttgtcccatttctctttcatcaacaagtcacactgggagggagcaaacatctcgatgtggatttatcagcaaatctctggcacagagtgttaaacctgtctagagtttcaaatagcataatatgttcttttcaaccactatatagacttcatgtgtcctgtgaaatactacagttgctatacttcaagtccgagttaatgttaagagcaagttttgagaggagggtccatttttttgtacttttcacaaacacccgtctgaaaacagttacagaagtcttgggaacagtttttcatagcttatcacctcttgttccctctggcagacatagacggccaccctgtaagtcacagggatgggttttctgtggtaattgctaaagcatcgtcttcctggagtcttttcttgttttcatgacttctgcatacacttttgattgatatttaggcaatagtggatatatgatatgtttttaggaagttagagattcctttagattttttaaagaagaggtccaatattttcagagccttggaattcgtttccaaaacctcagagaatagggggaaatggtgtagcactggttacactgcagttcctggtagggtgtggaagatggtgtggtgagcttgatttcctgtttcagagattaaaacaattttctgaggaaaaacattttttcaaaaatcttttggagtatccagggagatttccttccaagtgattattccacaaaggtaaggaggtgagtcagccagatgtgctttttctcatttggataaacttttgatggtctctgctgagggacttgagtttccaactttttggactctgtccagctgttctattaggggaatgcacttttcaaatatgttcaagaatataagtccttccaagtacttctctgacaagtgtttctgtaaaactgaatggcaattgcggcatccaaaaacattagaaatgtgtatcttttgcatatcacaacagtacaaagaagaaagatgtgtgctgccccctgaactgtagtgcttttctaaaatatgtttgaacttcagatgtgtttgcttaagggtgtgatggaactaatattctttattttgtgataatgattacttgagcactgtctgtgccttttttttttccaaaggaagtacattctaagcattgcttaatatctggcagtcatttaagcaatagaaagaaacatttgatattttttgcatcattttccatccaaataataatatcaaagcaaaaaaatacccagacactggttgtaaaaatatagaaattgtggcaacagccaattagttcccagaaagtcttttggtttcataaaactttccataataatcatgcattggaaaatcttctgatacaaacaggagtcatagtcaggctaatacattaaatgaatctaatttatcctcctatttccaaaaaagaaaacacatagtctgaaataggattcacagagcaacaacaaaagcaaaaaagatcaatatgtatttagtacacagtaactgaggcagaaacactgctatattcatacactattacatttatacactgtttacatgaaggaattgttgagtgcttgaaacatttcaacgtgcagtgcaactctgacctgaggtaggatacaacaggaaaaaatcagggattttcctgaaatcaattcaatgctggtaacaagtacttcaaagactgatctatggtttctacagtgttattcaccaggaaatgtaccctccaatagcaatataccttctcttcactgtgtgccatggataaattttaaacaaggaaattttaagattgagaaactctatgttgttttacagcttccttccttagagcaactttgggattttaaataagtaccttatgaaattaagtcatatgtgttctgtttccagtacactctgaatatatgactatattgattttggtgattagatctatatcttaccatggttgtatttcttgctcccaatagacaaaaagcaaccataagccccttctcacatgtttagtgatagtaatcacttctaaaataactttttgtgaaatgacattcctcttgataacttcacacatcgtattttggattttagaccttggccatataatcagttaatttaatttgaatgtaagacacagctgggataagatcctgctaaactgaatacaagttaactccttctctcctcagtctctcctcatttaagataaatatgtcatctgttttctattgggatcttgactaaggcagtgttgttacaacagtcaaaatatgctgtgtctactgtaatttgtttttgttttgttttgttttgtttttgagacagagtcttactccatcacccaggcttgagtgcagtggcgcgatcgtggctcactgcaacctctgcctattgggttcaacttattcttgtgcctcaacctcctgagtagctgggattacaggcatgagccaccatgcccggctactgtagtttgaatcaagatatttctcatgtaaataacaatgtgaacatcttaatttcagaaaatattctctaattagactcattttttttctacagtactcttcatttaaacaaaatctcaaaagcatataaaacacaaatgttctgagtcttgccaacttttgactacatacatatttgtgtacctagactatattcacaagagacctactaatgtaaacagataaaacatgagttatcaaagagtcttccccctttatttccgaaattcaaaatgaatgccctacatgctcttaaaaccactcttagctattgagaaaaacttgaaagcaacaattgctgattgccaaattttcccataattctatctcctaggcatatagaagaattgtaatttttgtcccccataaaagtaggtagggctacttgacttgacttggtcaatgaaataagagcagaagtgacatgtcactgcctctgaaaacgagagccagtgtctagttctccaagctgccttctttcctcatgcttcagaaagtatgaagacacaactcaaaataaagcttccagcatcctggagtcttgaataactcagatgaggagagcccctctgtcaaaacagtatgaacacttaggatctgcaaggaatatacttagctttttaacgtactgagactaggggatgtttttgttacttcagcataatcttgcctatcctgactgatacaactactgttaccatccatcgtccacctgtgtttctttctttgtcttcagctcagaaatccctttggccacacaactgttacaactagctatcatgcagtcacctatgttctacagatgcagcataaatatccatatcccctattgttgctagatgctattgcaaaggaagaggagatggcctttttgaaacactgtgccacttggacagccaaagaactctgcttatgttgcagtgaaacagtatctctctttaacaactttattagttctagtcattgtccttgccatgaatagcactgatagttttactcctgtcttcaagcaactcatttccgaattaagagactaagtagggaaattatgttctgtaacatctcccgttctcctattctttctcttgtcccatgtaaatacagcaacaaaaatctctgttttgctcacttataaaacaaatggtctcatgctaatcattgaatgtaaacagttggtggtattgatagggggcaggcaagttgttcaggctagtagaatctgagccatacttcacccaccaaaaaatgtcaggttccagcaatgaaacagatcatctgaagctggtgcctcacctcgttttcctgttttaccagtgattttactgagtttttaaaagccactgaactataaaaccttttaatctgaaaaagtaatagttcatcatagattcgaactattatgtagtttttttttcaattacttactgtcagattatctttctcccaattgtttataaataatggtaattcatattagacggtacctttattgggtgattcctcatgtatatttataagtcagctcatacaaagttacaatttcaaagatacatatgaacataaaatatttagaatgcaatgaaaattctgattctctgcgaatgacttgctcttagtttaaattttttattaaactgtttctgtagcataatatattttatattagatttattcttcaaaaatgagcaataaacaaaggctgattggaccacatgatttgactatttttattttgcatgtagtgctataagccacagattttttttttctgattctcatctcccagttttcccagctacccatttaaccagccagccaccctccagttcattacacaccaatgtgctacatcttctttttatcaacttacccttttatctaatacttctacctagtattttcctagtatttgcacttcatatctcatgtatctaaagtaaatacatatattttaaaactttatattttaaaattttatcaaaacagtacatgtacaatacttaagcaaaataatgtcagtaggttaatattttaaaatagcagtcactgtcccatcccctcttcttcaggttttatttttatttttaacttttattttaggtttgggggtattatgtgaaggtttgttacataggtaaacttgtgtgatgggggtttgttgtacatattattccatcacccaggtattaagtatccagtagctacccttttgctcctcttcgttctcctgccatcccacttcaagtagactccagtgtctgttgtttccttctttgtgtttataagttcttgtcatttagctcttatttataagacagaacatgcagtatttggtttctgttcctgcattagtttgctaaggaaaatggcctccagctccatccaagtttccgcaaaggaaatgatctcgttctttttttatggctgcatagtattccatggtgtatatgtaccacatcatccaatctgtcattgatgggcatttaggttgattctatgtctttgccatgccattgtgaatagtgctgcaataaacattcacatgcatgtctttatggtagaatgatttatattcctctgggtatatacccagtaatggggttgctgggtggaatggtagttctattttatagaacattaaggaattgccatagtgctttccacaatgcttgaatgaatttacactcccaccaacagtatataagtattgccttttctctgcaaccttgccagcatctgtagttttttgacttttttttttttactttaaattccaagatacatgtgcagacagtgtaggtttgtcacataggtatacatgtgccatggtggtgtgctgcacctatcaaaccgtcctctaggttttaagccccgcattcattcgctatttgtcctaatgttctccctcccctctcccccaatccctaacaggccccagtatgttttgttcacctccctgtgtccatgtgttctcattgttcaactcccacttaggaatgagaacatgtggtgtttgggtttctgttcctgtgatagttcgctgaggatgatggctcccagcttcatctatgtccctgcgaaggacatgatctcattcctttttatggctgcatagtatctcatggtgtatacgtaccacagtttctttatctagtctatcattgatgagcatttaagttggttccttgtctttgctgttgtaaatagtgctgcaataaacatatatgcacatgagtctttgtagtagaatgatttacattcctttaggtatatacccagtaatgggattgctgggtcaaatggtatttcaggttctagatcctggaggaatcgcgactctgtattccacaatggttggactaattcacatttctaccaagtggaaaagcattcctatttctccacagcctcatcaacatctatcgtttcttgactttttaataaagtcaccattttgactggtgtcagatggtatctcattgtggttttgatttgtatttctctaatgatcagtggtgtcaaacttttttccatatgtttgttgcctgcataaatgttttcttttgagaagtgtcagttcatattatttgcccactttttgatggggttgtttttttcttgtaaatttgtttaaatgtcttatagattctggatattagtcctttgtcagatgggtagattgcaaaaattttctcccattctgtaggttgcctgttcactctgatgatagtagaatctctgtgtagaagctctttagtttaatcagatcccatttgacaattttggcttttattgagattgcttttggcattttcttcaggaaatcaatgcccatgcctatgtcctgaatggtattgcctaggttttcttctggggtttttagagcttggggttttatatttaagtctttaatccatctggagttaatttttgtataaggtttaaggaaggggtccggtttcagttttctgcatgtggctagctagtttcctcagcaccatttattaaatagggaatcctttccccattgctttcttttcatcagctttgtcaaaggtcagatggttgtagacgtgtggtgttacctctgaggtctatgttctgttccattgatctatatgtctgttttggtagcagtactatgccattttggttactgtagctttgtgatacggtttgaagtcaggtagcatgatgcccccagctttgttctttttgtcttgactatatgagcccttttttgcttcatatgaaatttaaagtagtttttttctaactatgtgaagaatgttgacggcagtttgatggaaacagcattgagtctataaattacttcgggctctatggccatttttacaacattgattctacccatccgtgaggatggaatgtttatccatttgtttgtgtcctcccttatttccttgagcagttgtttgtagctctccttgaagagttctttatgtcccttgttaattgtattcctaggtattttattctctttgtaggaattgtgaatgggagttcatttatgacttgcctctctgcctttctgtttttggtgtatgggaatgcttgtaatttttacacattgattttgtttcctaagactttgctgaacctgcttatctgcttaaggagtttttggtctgagacaatgaggttttcaaaatatagaatcatgtcatctgcagacaaagacaatttgacttcctctcttcctatttgaatatcctatatttctttctctttccaggttgccctggccagaacttccaatattacgttgaacaggagtggtgagagtggacatccttgtcttgtgctggttttcaaagggaatgcatccagcttttgtgcattcagtatgatattggctgggagtttgtcataaatggctcttattattttgagatatggtccatcaatacctggtttgttgagagtttttaacatgaaggatgttgaattttttcaaaggccttttcagcatctattgagataatcatgtggtttttgtcattggttctgtttatgtgatggattatgtttattgatttgcatatgttgaaccagccttgcatcacagggatgaagccgacttgatcatggtggataagtttttgatgtgctgctggatttggtttgccagtattttcttgaggatttttgcattgatgttcatcagggatataggcctaaagtttttgttgttgttgttgtgtctctgccaggttttggtatcaagatgatgctggcctcataaaatgagttagggaggagtccccccttttcaattgcttggaatagtttcagaaggaatggcaccagctcctcgttgtatctctggtagatttcacctgtgaatttgcctactcctgggctttattatagttggtaggctatttatcactgcctctatttcagaactggttatggtctattcagggattcaatttctttctggtttagtcttgggagggtgtatgtgtccacaaattcatccatttcttctagattttctagtttatttgcatagaggtgtttatagtattctccaatggtagcttgtatttctttggggtcagtggtgatatcccctttaccattttatatttttgtctatttgaatcttctctcttttcttctttattagtctacctaacagtctatctgttttgttatttgtttcaaaaaaccaactcctggatttattgtttctctaaaggatttttttatttctctatctccttcaactctgcgctgatcttagttattacttgtcttctgctagtttttggattcattcactcttgcttctctagttcttttaattgtaatgttaggatgttgatttgagatttttctagctttctgatgtgggcgtttagtgctataagtttccctcttaacactgctttaactatgccgcagagatattggtacgttgtctcttcattatcattggtttcaaataacttcttgatatctgccttaatttccttatttatccagaagtcattcagaagcaggttgttcaatttccagatagttgtgtggttttgaatgaatttcttaatcctgagttttaatttgattgcactgtggtctcagagactgtttgttatgatttccgctttttgagtttgctgaggagtgttttacatcctattatgtggtcaattttagaataagtgccatgtggcactgacaatgtatatgctattgatttgggttggagaggtctgtagatgtctgttaggtgcacttgatccagagctgagttcaagccctgaaatccttgataattttctgtcttgttgatctgtctaatattcattgtggggtgttaaagtctcccactatcattgtgtgggagtgtaagtctctttgtaggtctctaagaatatgtttttttgaatctaggtgctcctgttttgggtgcatatgtatttagggtagttagctcttcttgttgaattgatccttttaccattatgtaatacctttctttgtcttttttgatattgtttggtttaaagtctgttttttcagagactaggactgaaacccctgcttttttctgctgtccatttgcttggtaaattttcttccctccctttattttgagcctatgtgtgtctttgcacgtgagatgaatctcctgagtacagcacaccgatgggtcttgactctttatccaatttgccagtctatgtcttttaattgggacatttatcccatttacactaagtttaatactgttctgtgtgaattggatcctctcatcatgatcctatttggttattttgcacactagttgatgcagtttcttcatagtatcattggtctttatattttttgcgtgtttttgcagtggcaggtactggttcttcctttccatatttagtgcttccttcaggagctcttgcagggcaggcctagtggtgatgaaatccctcagcttttgcttctctggaaatgattttatttctccttctttatgaagtttagattggctggatatgaaattctgggttgaaagcctccactttcttctggcttgtaggggtctgctgagaggtctgttgttagtttgatgggctttgctttatagataacctggcctttctagctgtcctttctctctggctgcacttaacgttttttccttcattttgaccttgaagaatctagtgattatgtgtcttagggttaatcttcttgtggagtatcttagtggtattctctgtatttcctgaatttgaatgttggcctgtcttgctaggttgaggaagttctcctggatgatatcctgaagtgttttttcccacttggttccattctctctgtctctttcaggtactccaaatcaattgtacgtttagtctttttacatcatcccatgtttctagaaggttttgttcattactatccatttgttttactctaatcttgcttgcatgctttatttccagcaagattgtcttcaaactctgatattctttattctgcttgattgatttggctattgatacttgggtattcttctggaagttcttgtgctgtgtttttcagctccatgagatcatttatgttcctctgtaaactggttattctagttagcagctcttgtaaccttttatgaaggttcttagcttctttgcattgggttacaacatgctcctttagctcagcagaatttgttattacccacattctgaagcctacttccgtcaattcgtccatctcatcccccgcctaattctgcacccttgctggagaggtgttgcaatcatctggagagtaaggggcactctggcctttcatgttaagcctttttttcattgattatttttcatcttcatgagtttatctagtttcaatctttgaggctgcttggctgaggttcttatggggacttttgttgttgatgctgttgttgttgctttctgtttgtttttctttcaatggtcaggtgcctcttctatagggctgctgcagtttgcagggggttcacttcaggccctcttcatctggtttgctcctgtgcctggatatgtcactcgaggaggctggagaacagcaaagatgggtgcctgctccttcctctgggatctctaaaatcaaggcgtatcaacctgaggccagtaggaacgctcccatgtagggtgtctgacaaaccctgttggagggtctcacccagttgggtggcatagggagtaggacccatttaacaaagcacttgagctgtccctttttggagggggtgtgctacgttggggagaaatccacttgtctgggctgcctggattcctcagaagtaccaggaggaaagactaaatctactggtccatggggactatggccaccccttcccctagaagctaaggtccaggcagatcagagttctgtccctgagaccctggctggagttgttggagttcctgcagggaggcgccaccaagtgagaaggtatgggtcaggatcaggcctgaagaggcactctggccacagtctgccacagccagtgtgttgggctgtggggaataccttttgggactaagccgtccagcctccctggctccagcatgggcaaagcacagcctggaactacagagatggctgctacctttcccccaccctaggagcttagtgtgttaggcagctggcagtcccagtgttggctaccaccccttccctaaggagttcaaatggcttagacagcaggcagccttagctgtggtgctggctgcccctacccccaggtacttggcaagcttaagcagattctagctgagtggatgttgagaatctgtgcatctctgtggttgggaccctaggccctggtggcaggggcttacaagtgggatcttccgatccgtgggttgcacagtccacagagaaagcatggtttcctaggctgggtagcacgctcactcaccgcctcctttgactgggggatggaggctcccctgcccagtgtggctctcaggtgggcggcctcaacacactgctcttctttcctctctgtgggtcatgccagccacctagtcagttccgatgacagcgcctggatccccagttgacgatgcaggattcgcatgctgttatggttctttttgatgggctcttccaattgccactgcttctagttggccatcttggccctgatccccttgactttttaataatagccattctgactggtgtgagatggcatctcatttttgttgttgttgttgttgttttgttttgttttgtttttgtatcgagtctggctctgtgggtcaggcttgggtgcagtggtgcaacctcggctcactgcaacctcaacctccacctcctggattcaagtgtttctcctctcctgcctcagcctcccaagtagctaggattacaaatatgagccaccaagcccagctaatttttgtatttttagtagagttggcatttcaccatgtcgcccagcctggtctcaaactcctgacctcaggtgatccgcccaccttggcctcccaaatcattgtggttttaatttgcatttctctaatgatcagtgatatcaaactctttttcttttttttttattattatactttaagttctagggtacatgtgcacaacatgcaagtttgttacatatgtatacatgtgccatgttggtgtgctgcacccattaactcctcatttacattaggtacatctcctaatgctatccctcccctctccccccaccccatgacaggccctggtgtgtgatgttccccaccctgtgtccaagtgttctcattgttctattcccacctatgagtaagaacatgcggtgtttggttttctgtccttgtgatagtttgctcagagtgatgatttccagcttcatccatgtccctacaaaggacatgaactcttccttttttatggctgcatagtattccatggtgtatatgtgccacattttcttattccagtctatcattgaactctttttcatatgcttgctggctgcacgtgtgtcttcttatgagaggtgtctgttcatgtccttggcctactttttaatgtggttgtttttctcttataaattcattgaaattccttattgatgctgggttttagacttttgtcagatgcatagtttgcaaatattttatcctattctataggtagtctgtttactctgttgatagtttcttttgctgtgcagcagctcttaaagtttaattagatcccactttgctttagttgcaattgcttttggtgtctttgtcatgaaatttttgcctattcctatgtctaggatggtattgcccatgttgtcttccagggtttttatagtcttgggttttacatttaagtctttaatccttttcgagttgatttttgtctatggtttaaggaaagggtccatgtttattcttgtgcatatggctagccacttattgcagtaccattttttgaacagaaagtcttttcctcatttcttgtttttttcagctttgttgaagatcgaacggtcagagatatgcagccttatttatgcactctctattcagttccattggtccatgtgtccatttttgtaccagtaccataccattctgtagccttgtagtattgtttgaagtcaggtaacatgatgcctccagctttgttctttttgcttagcattgccttggctattcaggcaattggcttttggtttcatatatattttaaaatagtttttcctagttctgtgaagaatgttcttggtagtttgatagcaataacataaatctctaaattactttggaaagtacagacattttagtgatattgattcttcctatccatgagcatgggattttttttttatttgtgccttctctgatttttttgagcaatgttttgtgattctcattgtagagatttttcacctcactggctagctgtgtccctggtattttattatttttttgtataagccacagattaattaatgtatctgattttggctagtaatataaatctattgtatcaaaggggctctgatctaatttctttaacacattgaaatccataaaagtatatagcttttatcttaggtgaactattgcggcacattttcacagactatcagaggtacagagaagtgtgtgtgtgtgtgtgtgtgtgtgtgtgtagggggtgacactttcagagaaattgggaattcaccttggtaaagagagattatacttattcttcatggtaatcagtcaattcctactgagggtggatgtaggaatggtttaaggaactaggctggattaatagtgaaacactgacttaattgtgttccctgaaaatggcatctggagccctcctgcttctagtatctttgagagcttgaggtactctccatctgctcttgacttcccattaagtctttgaagagttttaggctatagtttctttgttcttttctcttctgctttctatgttccagaaatttctcggtatttccttttatgttcatgacatagttacttgtttctcagcactatgatggaataatttgtagtttacaatttttttggaatttcaagtttttgaggcagagatatgtatgcaatctgcaatccagatccgacctgaagcgcatttacagaacattctgaaaatctcttagataaagaagttatatctcaatgtctttagaatttccaactactaaaatataaactttatataatttataaaaatatttggggccaataatactaatagaaaatattccacataaccatttggttttgtaaatattgtattaataccaatacattaatcttttatatttgtggaatgcatttatttttgcaaaatgtgctgttttctgtgatatatattattgattaaattaatatttgctatttttcagttattccaatatttgtagagtttataaagtatatattttgtcatgcataagaaacataagcatgagtgtaaaagagacaaaaactgttggctaacagttcttaaacgcttacaatgtaaaatcattatgctgaagagtttgcaagctcttctccatttactatcacacactctgaggtagaaattattactatcttcattttgcatataaaaattgggatattaatgtgtagcaagtgttaaaatgttaatgcacaaaggatagtgataataaaagttagggaagcacatttcttataaagaaacacgaaagacttggatattacaaaatgaggatttgccaaacaaaaaatgaatggaaataaatgttatctccaaggaaaaggacaggggatcccacttatagaggttcaagtgcttattaacactgaaatgtggccagattaaaggggccaacagatttctggaagggaaactggccatggccagatcatgagttctgatcctctttaatagatgagtaggaagccacataaagctatctattatggtattaccacaataccaaattaaagtttgagttcagaataaaaactttagtgatttatacacagcttaatacaggttattttaaaatttctctgcctttttatttaatagaaggggatagctgagctttagaataaaacttgagttttagaataaaaactttagtggtttatacacagcttaatggaggttattttaaaatttctctgccatcttttttttttttttttgcataaggggatagctgtctttaaggtgcataggatgttctacacatcttaatagtttccatagttacgttgtatcattcccaacaagttagtagagtgagttgaagtaggctcattttacaggttggagaagtgagtcacagaaaggatgtaaaaacgtccctagattacataaggggtggggccaaaatgtgaaattatcagactccaaaacttggccaaaatgtgtgagaaagtactgaaagtcagagccctgtgcaatatatttctgggatgtagtaacatatgtttagtatcactaagtatttgataaatgaacaaaaatgtagcgtaatgtacaaaatgtactttattggataggaattaaattatttacaagtaaaagaatcagctggaatcaattggctattatttccagttgactttaaatgataagatgccataaataggcagaaaaaaatcctcaaaagatttctaagtttatccaactttgagagtaaataattttactactgaaacaagactcagtgttcaatagtatatctattttctaaagtttagatgctgaatttcattcccaaatttgcttttgtttacatgtccttttattattgtatttaccatttaaatctcttatcctgtagtaacctcctcttaccatcctttccctttacatgtagaaaagctttaatatcactatatatttatttaaccaagtgtttgtgaattttgtggtggtgcacacctgcaagttaattatcatctggagaaacactctagactgaaaggaatttcattttcaacaacggtgtgagtggactagttctctttttctcctccaagatacacatgcaaagcttaaaaacacaactataaatgtacctaaaggaaattgtaacatgctttattttatatccccaatatcttgcaatggagtagtaagccaaagatcagaataatgccaggagaaaatgtaagcctatgaaccttgcattctatagtcatgatggccattattggttaaggtcactgaaagcaatgtacagtcgtgaaggaatttcaaaagcctgtttgcaaatggctatggccaataaccatgttcttaggactactttagaagccatgaattttaccttaaaaggttaatctcttagagatttttagattacatggctgaaagaattgccaaaaattttgctggtctgttttacatttttaattataccactatcaactctggcaccaaccactgttaacaccaatcatcaaccccgccaacaccaccatcaccactgccaccactaccagcacaaacattatccaaataatagcagcaacaccaatatcatcgttattgctaccattaccattatcagcactatgaatttcactgccaacaacattggattcatcggcaccactactgacaatgaaaaactcattaccaagagtaacaagtacttagtgagaatataaaggcttattttttccctcttctgccatgccatctccaaatgtgaataatttggtctttgtttcattacatcattaaaacatcgagtagtattgtaagacacaaggagtgccattgaaaaacatttattgctatattaaacagaacaggttttcactactagtagtctaatttttatagaaaagctacaaaatctactctgtgtgagacctggagatttaatcagcagccacaaaacagcactcagtctaacttttaagcacagaaataaacattacatatattcaagtagttcagagagcaatgtaagaatgtgatttatgtttaatcataaaaatccttaggcttagtttgaagaaacttaaagacatataagagagggttactttagtatactaaccctgcttgtcaatatcatgaactagcatttttgtggcagctttaatttttgagacttcttttattttaattagaatatagacatatgttgaaggtggaaaaagttaaattgagcatcaataataaacacaaataccagatgattcaactgttatgaaatgacactatttgtgaatgttcatcactgtgaaattttaaatagtctgaaatattagtttgagaataaaaggcatagattaatgcttttctttttctagtaaattttaagaactgttttaaaaaatgtacagaaaaaaataagaagataaaacatggagttctcataacccccaaatccagattcctctattactaacatcttatactagtatgatgtgtttgttacaatgaataggccaatgctaataccaatcattaactaaaatctatagtttattcacattttcttagatttcacttaatgacctttatctgttccaggatcccgtctagtaaccacatgacatttagctgtcatgtctccttagaatcatctttgctgtgagtttctcagacttctcttggttttggttctaaaaattgattatgaaaatcttgagaaatactggtcaggtatgtggtaggatgtccctctattggaatttaatatttttccaatgattagggttagatgttccccagataaaagactatggaggtaacgtgccagttttcataacaacatatcagtggttcacattatcaacacgacttatcattgttgatatcatcccatcacctggctgaagtggcgcttgtcaaatttatccattgtaaaattactctccttcccatatttttctctttggcaggaagctactatgagcagcgtacactgaagaagtggggaattatgtaacacttctatgagggaagcataacaacataaattacttgaaattctctagcatgagagatttgccttttctccccaatttcttggtcatttatttctaaaactatggacctgtggatatttattttatactttggggtataaaccagttctaatctattcactctgttgttctttgtttcagccttggccactggatgttctttctgttggtttttgtgcctctttgatatacttgcaccattagcctgtgtgttgagtgttttcttaatttctataactgcaaaatgctccaggagtatcttgtatgtttcctggtctagtcctgaaatcagtcatttataaagtcctggttttgttgttgttgtttctctttttttaaatggagattaatattaaaaatgaagatctacatgttaggtgtgctcttttctactggggtatctttgcttctggacatttaaggtgagaaagcaaaagaaatatatatgggtttatagtaacccgtgtgtaaatacatatctataaatatttcttcatgtaaccatctgtatccatattaagttaaacatgagtttgagttcatactgatgtattcaagttcagttcattatgacatggatcattctagcctcctcccctgggttacctgtcacctctcattccagcagtaagaagcttttttttttttcttttcaacttttattttagattcagaggtttaataactaggaatattgcatgatgctaaggtttggagtaggaatgatcccatcatccaggtactgagcttagtacccaacagtttttaaatccttgccctcttccctccttccaccctctagtagtctccaatgtctattattcccatctttatatctatgtgtagtcaatgtttacctaccatttataagtgagaacacgtggtgtttagttttctgttcctgagttaatttgtttatgataatggcctccagctgcatccattttgctacaaagaacatgatttcattcttttttatggccatgtaatagtccatggtgtatatgtaccacatttcctttttctgatccaccactgatgggcccctaggttgatttcatgtcttttgtactgcgaatagtgctgtgatgaatgtgagtgcttgtgtcttttaggtagaacaatttgttttcttttggacatatatccagtaatgagattgctgggtcaaatggtagttctactttaagctctttgagaaatctctaaactgcttttcacagtggctgagctaatttacattctcaccaacagcatatgcctctcctgttctctgcagacttgccagcatctgtcggttttttatgttaataacagccattctgactggagtgaaatggtatcacattgtggttttgattggattttccatgatgattagtgatgtggagcattttttaaagtttattggccatttgtatatcttcttttgagaagtgtcttttcatgttctttgcccgtttttaatggagtagtttgatttttgcttcttcaattgtttaagttctttataaattttggatattagactgttgttggatgcagagtttttgaatattttctcccattctgtaggttgcctgtttattctgttgatagttttttttgctgtgcagaagcttttttgtttgattacatctcacttgtagatttttgtttttattgcaattgcttttggggacttagtaataaatcctttcccaaggccaatgtccagaatggagtttcctaggtttccttctgggagtcttacagtttgaggtcttacatcttaagataaaaccatcttaagatgtaagacctcaaaaaacaatatccatcttgagttgatgtttgtatatggtgaaatgtggggatccagtttcatttctctgcatatggctagccagctaccccagcattatttattgaatagggagtcctttcttcattgcttatttttgtcaactttgttgaagattagatggctgtaggtgtctggctccatttctggattctcttttctattacatttgtctatgtgtctggttgtatagtatatgtagagtatcatgcctttttggttactgtagccttagagtatagtttgaagctggataatgttatgcctctggctttcttctttttgcttagagtgctttgtctattcagcttctttttagttctatgtgaatttcagaatagttttttccaattctgtaaaaaaaaaagatactggtaatttaataggaaaagcactgaatctgtagattgctttgggcagtatagtcatcaaatgctttttacgcatcagttgatatgatcacatactttttttacttttgcttgttgatgtagattacattgatttacaaatacagaatcaacatagtataaatcaaataaatatcataggttgtggtacataattttttatacattgttgagttttatttgtttatatcttgctgataatgtttaaatgtgtttatgagagattttggtctgtacttttcctttcttgtaatggcttcatctgattttagcactacaataattctggtctcctagaataagcaaagaagtaatctctgtgcttctatttgctggaagataatgtgaaaaaatcttattaacttttccttaaatgttggtgaaattactttgatctggtgcttttttgatgattgttaattatttactcaatttaaaaatagatataaaacattttaggtcatttttctgtataggcacaagttttagtaatttgggtttatcaaggaattggtccagtttatataatgtgccacactagtgggcgtagagttgtttgtagtatttcttcattatctttttaataactacagaatcactagctatgacatcattttcatttgtgctgttgacaatttctgtcctcgctcttttttcttggttggcttagagttttttcaacgttgttgataattccaaagaactaaattttgctttcattgatgttccctattgatttattgttttcgactttcttaattcctgttctaatttttttttttttttttttttttgagacggagtctcactctgtcacccaggctggaatgcagtggcgcgatctcggctcactgcaagctccgcctcccaggttcacgccattctcctgcctcccccttccgagtagctgggactacaggcgcccgccaccacgcccggctaattttttgcaaatttagtagagacggggtttcacctcgttagccaggatggtctcgatctcctgacctcatgatctgcccgccttggcctctcaaagtagggattacaggcgtaagccaccgcgcctggcctttctgttctaatttttattatttcatttcttctgctagctttcggcttaagtcgctcttttctaatttgccaaaattagaagcttaattactgacctagatatttcttcttttctagtatgtgtatttaatgttacaaattaccttctgagcacttctttcactgtatcacataaattgcaatcgtcttttcatttcattagttgaaaaatacgtattttaaaatttcacttgagacttccttcacccatgttatctaaaagtgtattgtttaatctccagattttatatgatttttaatctatcttttggtttctaattgatttcattgtggtatgagaaaacacttcgcaggatttctgttattttaaatttgttaagttttattttgtggcccacaatgtggtctatcttggtgaatgttctctgtgagctatgggagaacacatattatcttgtttgttgatggagtactttctaaatgtcaattagactaacttggttaacactactgttaaagtcaactatacacttactggttttttgcctgtctgatctatcaataatacaaaggtattgaggtctcttctatggactgaatgtttgtggcctcccaccccacaattcttatgttaaaaaactaatccccagtgtgaatttggaggtggttaggccatgagggtttctccctaataaatgggactactgctcttataaaagactccagagacctcccttaccctttcaccatgtaatacactgaatatgtggctatttatgagccaggaagaagtgtgggtggggggctttcacacgacaacgtatctgctgaaatctggattttggacttctcagcctctggaaatgtgagaaataaatttgtattacttataagccacccagtttatggtgttactgttttagcagcctgaacagactaagtttctaactataacaatagttatattgttagttgggcaaatagttggattcatctattgtttcttgtagttctttcagttcttgcattctgttgttaaatgcagacatgctaagtattatttatctttaagagagtttatttctttatcactgtttaacactcctttttatctttaatactctcttgttctgaagtcagctgtgtcttaaatcaatgtagttgtttcagctttcttttagttattgttagcatggtgtatctttctccattcatttaattttaatttctatgggtcattatatttacagtggatttcctgtaggcaatatatagttgggccattttattttttgtccactctgacaatctttttattttgtgtgtttagaccattaacatttaaagtgattattaatatagttgcattaacatctaccatgtttgtaactgatattcattgcatttgttctgtttctttcctgccacactatttttctgccttatatgactttaattgagcattatatatgatttcattttatttcttctcttagcatgtcaattgtactttaaaatactctgctaattaaagtattaaaatgctttactctattgttgccatagagttctttatatataatacatttttacccactgaaaatccacctgcaaataagacagtaatatttcacatgtagtgcgggtaacttctaacaaagtatttctaattccccctcccaccttttataaaattactatgattcttttcacttatgtatatgccagaattttggaatgcatgattcctattattgttttaaagttgttattaaaaatgataaaaaaatgaaaagaagtattttaactttttttgttcatttactgccattcttcttttctttatgtagatataactgtctgacctgtgtgcattttaatctccctaaataattttattttgacatttctgcgaattgggcagatctgataattatgaactcgcttagtattgtcttctgaggaaggctttattctctatttctgaagcataatgttactggataaagaattctgacttggtaacaactttctttaaatacgctaagtaattcactgcaccttctttttggatcacttctaatatctaatatactttttattcctattattctatagtattattgttttcctctggcttctttcaagattttatctttgtttgattttctgcagtttgaatacattatgcctatatatacattttttaggtatatcctgcttgaaattttctgacctttctggatctgtggtttagtgtttgtcattgatatggtttggctgtgtccccacccaaatctcatcttggcgtgtagttcccataatccccatgtgttgtgggagggacttggtgggaggtaattgaattatggtggtggtttccccctcactattctcatgatagtaagttctcacaatatttgatggtttcagagggggcttccccatttgctttgttctcattcttctctctcctgccaccatgtgaagaatgaagtgttgcttctgtgagtcaattaaacctctttcctctataaattactcagtcttgagtatagcttcattggcagagtgagaacgaactaatacagtcatccattttttaaagtcttggccaatttcattttaaatttgtcttatttaattctttcttccctttatgtttttccaattatgtatattatatctttttaacttgtcctacagttcttagatattctgtctttttattttattgtcagtttcttttttctctttgcatttcatttaggaggtttctatagccacatgatccagctcactgattcttttctcagctgtgtcgagtctgctgatgagctaatcaaagccattcttcatttagattggtgatttttatttctatcattttcttttactttattataatatttttatagcttttttacattacctacctgttcttttacattgttagttttttttccattagagcttataatgggttaattacagttattttaaattccttctctgataatttcaatatcagtgtcatatctgtgtctgtttctgatgtttgccttgtgtcttcagactgtggggtttttttcttgccttttatcatgcttttattttttgtttaaatctggacctcatgtattgggtaataggaactgagataaatagtcctttagtgaaatggtttatggtgatctggctaaaaattgagctttgtttattgtgtgccataggcgtaggtaccagaagcttcaaatttctttagtctgtttgattttgtcttccctgttgtctctgagatttgctaagaactcatccttagataaagttttgtcatgcagcaattttgtctgtaatccactattggtaacctggatccttgctggtattggggtaaggtgtgagggagggtaagttttccataatatcatgattaaatctcagtattttaactagtatctcaccttcacaactacttcttggcatttacttcaccattaggtgaaacaggaaggctagaatgggctggagaagggcaaatacactttcccatggagagaaggcctttgctgtcaaaaacattctagatgtatttaacaatggctccttttctttatcccttccagagccacatatgaagattttttgactcttcaccataagatgtaggtgcagttcctggagattgaacccatgaaagtgtagggaaccccttagactgtgaccttcaggagtttctcactctcaaagtagtctacagtcaacctcccggaatttgtcattattaccactcacgtgttcataccagtttatggctacagaaacgtcttccccagataaagcgatcttacttgagactctcggatttcatatttcttagaatttcagggtagtggttttctctgtaatcctgttcctctgatgagtccaagaaaagttattcgttttcagtttgtttagttttttgtgttttaagaacgcatacaatttacgatctctttatgtattggagttaacagtgaaaccactttctttttaatattattaattttgatagcaaaatatgatagagaagataaaacagcattgcatcattaaatatattttcattatagtagttttcatacaagtttatattaataatattaaattgacactaatgtttaaacttcatgactatcaagtgaatacacacaagactttttaaatgaaccctaagatatagtcacattgattgtatcaacatgaactatcctagaattgctcaaagattcaaaagaaatgctatataaaccttattacaaatagaattcttccatgtgaataatagaataatgtgaaatattattataaatatagatttcatgaacctaatttttttctttttttaaaatatatttagctataaaaaatggcatgcctaactttatttgatagtgatggggtcatttgagttgccctttgcagtattactttttttagaaagacattagaaaattataaatctatatgtgtgtatatatgtatgtagatttgtagaatgtgtaataaataattatgttacattgaaggcaggctgagtatatttttccagttaaaaaattagtaaactatgtattttatatatccagatcagcagtcagcaaaaccctggcctatagtccaatccaactcacagcttttttttaagataatgttttactgaaacatagccacctcgtttatttacatgttgtttatggcttcttgcaaagctgaaaaagcagagtttagttgcaatcgagaccttatagactcccaagctagaatatgtattattgttccctttgcagaaaaagtttctctatccgtattctacatacaacatcatttaacttaatgtaccagaatttaaaatgtaaacatagaatatgttgattaactattggaatttaatgaaaaacacttaaaacttctaaaagcgtgtttattttttaagagaatatgtagttatgctttagtatttatttatttgtattttcacaacataggaaatattggcgcattgaatctaattttatggtacactaaaatgttcgtatcattgcacataactaatcacgatggatgtaacaaaagcaaagggaaaatactaataggagatgtttagtgatacctgctattttatacacaaattcataaaataaaacacttgagagccttctttagcattaaataggtattacataattgtacatttttaaatgtatatacttatgtatgtatattttttaaatatatgtgttaggacagttggatttaagaactttggtttcatctattacatatctatttcttccctatatgtaatagatgaaaagattttcatcggtaagttcgttttttctttctttccaagcactagcatgataaataaacaatttcaaagggaacttctaaatactgctttccacataaagttaaaaaattaagtgtgactcaaatcctgtgctcatgggccatttagtctttttcctgacttgtaacaagctcacatgtgaccttggaaatctgtacttgtcatgaagtttgagctttccgttaggttggtggatgcagtgaaaatttattagttaaagtaaggaagcagttaataggcatggcatggtcaagtcataaacaacactcttttactgagaccaaaagtttggtagtctggccttactctaaattatacttaaaccaaggaactaaaagagcaaaattccagccctgactcagtgttcacaggaattcataatcgtaattgagaatgagagctttcaaaagaggtagacaaggatatttgggggatttcattacaaatgtttcaatttactttttaaatgatgctcaaaccaaatatatattctgttttactagatgcaaaggtaccagtttaccttcacattccttgatctaaaaaggtacacatatttaaaacaaagctttagtacatatatgtcaaattgtcgatttctgtttcagtttcccaactatcttcatcaactttaagcattatatatctgtgtatgggccactttttgcgataaacgcaacttgtgttagtttggagccacacatccttcttatccaggttcccaggtggccccagcaatcctaccagccacaaccaagttccccattgcccaagagtatatagaatttggtgaaataaaattgtttttttttaaatttggagttccacccaccaaaacatttgtgctcattctctcaagattgttctctgtttctattacaggacccatctgaatttttagtgcctttatggaatttctgtactttgaccaaccagaagaaggactatttttgttaaagaatgttcatccgagccattccaaacatgccatagaagcaactgactattgaaggagacacccttgctttgacattttataacaatgatctatgtaatacttaagactctttaaatttgagataatagaaaatgtaactcaaactagtttaaacaataaagtgaatttattggctcatctaccagaggagtacaaaggcttgtgcttgtttatttgaggttgctactcatcaaagattcttcatttagtctactctgccttcctcaaagagcctcacactaaggctggcttccttcttttcaggaatgaaataaccacagcaggaataacatttataccttgcaacacttcaaaaggtttaaagaaagagcgtgcaattctagaaatggttttcccagtttcattagctgagctttgttaaagttcagtggcttctcaatggtattatgccagttggctgaattctgacacaacaagctccaccataagacacaggtgtgagaaggaagtgcaaacactcggatgaaaaaatagggcaattctcaagagaaggtgttatgattggtaaggagacgtgatggttcattttatgtgtcaacttgattggctcatgtggtgctcacatactggcctaaaattatattggtacatatctgtaaaagtgtttctggatgagattagcatttgaatctgcagactgaatacagctgatggccctccctaactagtgtgggcattggccagtcagttgagggcctgaataaagcaaaaggtggaggaagggtaatatctttttattctctgccctactgcttgagctgggagatcagatttctcctgcccttagactggacttacaccgttggtgctcctgactctcaggccttcaaatggggactgaaactacaccattagcttttccaggtccctagcttgcagatggcagatcatggggcgactcagccttcacaattacacgagccaaaaccttataattaatcttatagctctgtgtgtatatgtatgctatatatacacatatatatttatatggctatgtagctatgtatattttcttttatcctattggttcagattttttaaagaatcctgatgaatacaggaagtaatgagaatgtccatgacattcaaaatcatgaaatgatgcttataacctaatgataaattgtaactctgtttcttaatcttatgagtgtctctattttaccaaataatccagtcaaccaataaaagccatcatgaactggtagattaaaaagtttttcactttcaagttatcaagaacacttttcaataattcatggaaaattcacttcagctcacgcatatattggtatgtctttcttccctaaagtagaagaaaccaggaggaaatatttcaatttgattacacaaagaaaatggtttctgtatgcagaaacaaacctcagaacttactttaaaaaaagactaatagtgcaattcactatacttattttgagctactttacctgaacaccaaatactaaattaatggaaagcataatgatcacaacgaaaaatcaatctttaaaaatagagacaaatctttctttcatatttatgtactggtctgggaagcaattaaaaatggaggccgaggcgattggatcacaagtttaggagatggagaccatcctggctagaaaccccatctctactaaaaataaaaattagcttggcgtggcggcgggcgcctgtagtcccagctactcaggaggctgaggcaggagaagggcgtgaacccgggaggcagagcttgcagtgagccgagatagcaccactgcactccagcctgggtgaaagagtgagactctgcctcaaaaaaaaaaaaaaaaagttatgtcaatgaaggaatgatatttatctttttttttttccaatagtggcatttttagcttaatctgaaaacaaaatttactaggagtctttaaccaatttacatttttttctcttcttcacatattcctttctgaaaaaataataacctctatttgattgaagcccataatcatgtctaaaatcaccttgctctttgtgtacatttatccatacatatttactgagagcctcctacttgactggcattggattttgaatcaggaaataaaatagaagcaaaatgaaatatttcttgaaggaacggaatgtctaatgaattatgccaatggaaaactaggagaggaaggaaaaactttttttttttttttttttttttttgacgaagtcttgctctgtcacccaggctggagtgcagtggcactatctcggctcactgcaagctccacttcctgggttcacgccattctcctgcctcagcctccctagtagctgggactacaggcgcccgccaccgcgcctggctaattttttgtattttttgtagagacggggtttcaccgtgttagccaggatggtctcgatcccctgacctcgtgatccgcctgcctcggcttcccaaaatgctgggattacaggtgtgagccaccgcgcccagccagaaggaataacttttgtcctggagcaccacacaccaccatgaaggaggtgaggagggtgactaagacagctgtagctaattagggacaaccatatagagaagtacttgtgaaaagatgcatgaattagacttagctacacagaggaacagagagaggatcgcaagaaattggatatgtatatgtgtgattcaaagaactacagaaagttagaaaggaaaaatgtttaacttaaatgaggtaagatacaggccagatcacaaaaagcactggatcctatgaaaggtgtttgggttttaattactaagaatttcaaactgagcctagaaataatagatttttttcatgttagaatagtctgtctttattactatgaatgggagattggcttagcaggaacagagaatgaaatgctaagggcctgaaggaaggagatcaagacaaagaggcaataagaaagatctaggctaagaagctaaacacaaggtgaagggtgggaatgcttatgggagtacaaaatatttctaggaggaagttgttttaatgtgggggaagaggaagaagttcagaaacatgtcaaggtatgttgagctatgagaaaaccacttgaaggaaatgcaagaagggcagggttttcttaattctcttttttatttttccttttggttttatgcattggctcaagtgggaaaagtcccaggactctgggtatttccacttcctacccacactcctagttccactttcacggactctctaaaaatctaaagaattaatcccatcatgctctacttttctatttacatccttgccaccagctcaagtttcccagattcctctttgcctggaatcttaacccttacacgtggatatggatctctgaaattctaaaccacactgggcccttcagatgtccaacctaagcaaaatcttctacttcctcaagcgttcatcaaacatgccctttaccgtcttgttctaattgaaatctttctcatttctgtggaaatgctttttaacatttgttatttttttctctcatagtctttataagactggacatagaggtagagtaagttccctattgtctcttgatatcattttacacccgtttgttgctcccttcttttttccaaaactcccaactttgaaactcatacccttagtctatgctacctattacaaccccttgctgtaattgtttacagctttgggctcacatcgaaccctcattccatgatgatttctctacctgctttatcttccagcttttcaacatgataaagatatatatagtatatatatacatacacatatatatatctttgataaagatatatatacacacatatatctttgataaagatatatatacacatatatctttgataaagataaatatatacacacatatatctgataaagctagatatatacacatgtatatctttgataaagagatatatacacacgtaaatctttgataaagatatatatacgcatatatatttgataaagatatatatacgcatatacatctttgataaagacatatgtaggcatatacgtcttagataaagacatatatgtaggcatatacgtcttagataaagacatatatgtaggcatatacgtcttagataaagacatatatgtaggcatatacgtcttaaagatatatatgtaggcatatacgtcttaaagatatatatgtaggcatatacgtcttaaagatatatatgtaggcatatacgtcttaaagatatatatgtaggcatatacgtcttaaagatatatatgtaggcatatacgtcttagataaagatatatatgtaggcatatacgtcttagataaagatatatatgtaggcatatacgtcttaaagatatatatgtaggcatatacgtcttagataaagatatatatgtaggcatatacgtcttaaagatatatatgtaggcatatacgtcttagataaagatatatatgtaggcatatacgtctttgataaagatatatatgtaggcatatatgtctttgataaagatatatatgtaggcatatatatctttctaagtggcattcatagcaaaaaaagatatatatatctttatatatatatatatatatatctttttttgctatgaatgccacttagaaatttattctattctctgagactctcagttcattgactttctcttctataaccactttgttttccactacaactctcatgtcttataataggcttagaacattgttttttaaactagggaattaaaaagaaacagtataaaatatttcctgaaggaacataacgtctaataatgaattatgccaatggataattggacagatcaagatggatcaaagacttaactctaagatataatagcataaaaattatagaagacaatattagagaaacccttctaaacattggcttaggcaaagactttatgatcaagaacccaaaagcaaatgtaacaaaaataaagataaatagatgggacttaattaaactaaaaggtttccacacagcaaaacaaataatcagcagagttaacaggcaacccacaaagtgggagaaaatcttcacaatctatacatctgacaaaggattaatatccagaatctacaaagaactcacacaaatcagcaagaaggaaacaaacaattccatcaaaaagtaggctaaggacatgaatagacaattctcaaatgaagatatacaaatggccaatgagcctatggaaaaaagctcaacatcactaattatcaaggaaatgtaaatcaaaaccacaatacaataccaccttactcctgcaagaatggccataatcaaaaaataattaaaaaatagatgctgtcgtggatatgatgaaaagggaacaattttacactgttggtgggaatgtaaactagtacaatcactatggaaaacagtgtggagattcctcaaagaactaaaagtagatccaccatttgatccagaaatcacactactaggtatctacccagcagaaaggaagtcattatacaaaaaagataattgtacaggaatgtttagagcagaacaatttgcaactgcaaaaatataggatcagctcaaatgcccatcaatgaacaagtggataaagaaaagtggataaagaaatgtgtgtgtctgtgtgtatgtgtgtatatatatacgcacacatacacacacacatttctttatacatatatatatacacacacatacacatacacacacatacacacacacacacaccatggaatactactcagtcatgcaaaagaacagaataatggcattcagaaaaacctggatggaattggagactattattctaagtgatgtaactcagggggatggaaaatcaaacatcatatcttctcactcaaaagtgggagctaagctatgaggatgcaaaagcataagaatgatacattgaactctgtggactcgggggaaagggtgggaggggtatgagtgataaaagactacacattgggtacagtgtacactgctccagtgatgggtgcaccaaaagctcagaagtcaccactaaataacttattcatgtaaccaaacaccacctgctccataaaaagttatcaaaataaaacataaattaaaataagccagtaccagccactgcaaaaacataccaaattgtaaagaccatcaacactataaagaaactgcatcaattaatgggcaaaatcaccagctagcagcataatgacaggatcaaattcacacatagcaatattaaccttaaatgtaaatgggctaaatgggctaaatgtcccaattaaaagacacagactggcaaattggataaagagtcaagactcgttggtgtgctgtattcaggagacccatcccatgtgcaaagacacacataggctcaaaataaagggatggaggattatttaccaagcaaatgaaatgataaatgcatacactttgggaggccgaggccagcggatcacgaggtcaggagatccagaccatcctggctaacagggtgaaaccccgtctctactaaaaatacaaaaaaaaaaaaaattagccaggcgtggtggcgggtgcctgtagtcgcagctactcgggaggctgaggctggagaatggcatgaacctgggaggcggagcttgcagtgagcggagattgcaccactgcactccagcctgggcgacagagcaagactccgtctcaaaataaataaataaataaataataaaaataagaataaaaataaaaatgtttgattaaagccaaaagaattaagaaaaagattgcaaaagagtcagtgttgttaaatgcccaagagaccaagttagataaaaatttggatttacaaaaaggggattcttggagagctaattaaggcaggtttagagaaacaattggggcagaagccaagttacaatacatgaaagactcaatgggaagacaggagatgaaaccgtgggcatagattgcaggcgtattattcttggctattaaaggaagaagtaggagatccacagagggttagctaaaggtgggcacagagtaagacattgaaatttcatctgggagaggatatctaaagatgctaaggaaatttaatcaataatatggcagcatttgaagacctaggaggggatacttgataggatggggttcaggaacagataacgtgtctaaaaatcgacatcaacaaaaatagtcattttattgcaattgaccaaatgttcttttattatcagttttatgaatttcttagttctgagtactattaacaggtcagtcactttctatgaagcaaaaacaaagaaaaccttctgcaagctccaacctgatggctttaaactaagtaatgtgaaacaaaaggtatgaactatataaaaaaataggcttctgtacaaccagtgattaactagcaaaagcagaggaggactcttttttttttcctgcacattctctccctgtaggaaaactataagagaagccaaaatcatatcaaaaggcttgctcagtgtaatgatttgttcttggtaggaacaatagtggtctttggccttcctccccattagatgctgtaactactgtgacgatattctcgtggaaagctaattttagaacctactgagaatacaactgcacccaggtgggttatagttaccagagtgtatctgtaaatgtacatagaatttaattaatccataaaaagactactgatataaaaccggggaaaagctggaatgttttactagcaggcaatgaatagtctcttggtaatgaataaaaaacttaccttgctaataaccatgagaaagctcctaggtgttgaaatgatgtctcaataattaagtactaaagccatttttttgcacaaagtagaagtagatgtacaaaggagatgaaaggcaggcatcttctaaaatttgcaggtcctacacaatagtacaagtagtgtaccacataccatatatacacatatttaaaatatttgttgctagtcgttccctaggtcgattaatcttaaccttggctatacatttgaatcatgtaaagagtgttttaaaatgcctaccctgaacctttcaacttgctgagacttagatttatttatttgatggagtagttagtattttattatcagctcccaagttgatgctaatgtgcaccagggtaacaaaattcttcaaagaataattataaataccctggcatgtggtctacgacaaggatgacacttacctaacttaattctgtggaatatgagaacattcatgaatcaatctctcattatatttctgtttttggccagagggtacatttggctgcttttaaaattcaataaaaaactgcctgggaggaagactgcaaagctatgtagggaataaatacatctccaaagatggagttttctgaaacatcaagacgcacgtgaaaacaccttgaaacatacatgcaaattatctatcttcttaaccaatcttaatgtgattagtttcctctaaactagagatcacaaagataaatatttcttggttctaaattttccaggacaattaaataatccaccaaaataacatggatattttgaatagataatttcctgttcagtttaagtttacttatacaaacatgaggaatcatttgtagttattatccaggataagcctgcaactatgtagtaaagaaaatattctgtagataatacttaccacaaacattttttaaaatgtagtaatacatgtgctttttactttgagggaaacttgctgtagagttagcaaatatatattcattgaagagaaagttcaacaatccttgtaacaacgttttcaattccttccttcttatatagctgagataacacatttctagaatgactaagaaatagttttcttttggtgctatttttttcttaatgtcagcattataaatttatagtaaaatgggatgatttactcaaattagcaaatagttaattcacagacattaaaagttctaaattttttattgaaagtttttaagaaaaattacaaaaatgcattagtaacctgtgcaaaagcatttgagtatttgtttttctttcataagggacagaatactatgttgagctatttattaatacataactcattctctttttcataatcatattttctcatacttgaaagcttctctaattcagaaagctaggacatcctgcagtcactaacctcagagaaggtttgttacttgttagagaagtacgcatttcagtaacaccttcattaggaaaaacttggcttcaaacgaaacattattttctgaggtggaacacactttttggctattgatagtcacaggttcttaaagcacagtagttttatacatatatacattttatactgggctttatttttatatttgtgtactatttacttactttgaaagatatttttactcttagatttacataatggagaggacaccactaatcatcaggcaaatgcaaatcaaaaccacagtgagatatactgtcacaccaaacaggatggctattctcaaaaagacaaaaaataacaaatgctcatgaggatgtcgagaaatgggaactcttatgcattgttggtgggaatgtaaactagtacagccattatgaagaacagctaaagattcctttaaaactacctataggactaccatatgatccagcaatcccactactgggcatttattcaaaagaaaggaagtcagtatattgaaaagacatttgtaccttcgtgtttattgcagcactattcacaatagccaaagtatggaatctgccaaggtggccagctttcagatacatggactttaaaatgtggtacatatacacaatggaatactattcaaccataaaaaatgaactcttgtcatttgcagcaacatggatgaaactggaagaactctggaaggcattatgttaagtaaaataagcgatgttgtcactaatgtgtggaagctaaaaaaaatttaaaagatgacctcatagaagtaaaaatagaagagaggatattagaggttagaaaatgtaggggaaaaagagatagagacagatttattaaagattacaaaattacagctagataagaggaataatttttagtgttctatagcaccataaaatgactatagttaacaataatatattccatagtttcaaatagctagaaggatgatacttaatgttcccaacactaagaaacaataaatgtttgagatgacagatatgccagttactgtgatctgtatatgtgtatatagtgatctgtaatgatcactatacatggcacgtgtcacaacatggctgtgtacttcataaatatgtaagattactatatgttaaattaaaaatagatttaaaaactgtttggatgttcaaaatgaaagaaacactacaatgccttcagaggtggatctttcacagttctattctcaatacaaataaaaactgggactttttcagttaagagcacgcaaggcaaccaaagacaaaacaggatcatgcaaatacattgagatacctgccactgtttaatacacaccagaatacatagaaaagctcattgttagtccatatgttctttcttgaagtaaactgaaatactatttgaattagctcagcagaaagaagaacaaattttaatgataacgagctattttccaaaaatgagactaagaaagcagtaaataataatttactgcatatcctataaatgtgcgcaattattatgtaccaataaaaaaatgtttgaaaaagaaaaatagcagattgctcaaaattaaggaaacaacataatgccttcagggaacgtaataaggggatcttgtttctacaaggactccctttagatcagggtttctcaaacttggcactattgacattctgagctggataattctttgcagcaggaggttgtccatgtaaggttttcagcaacgtctctggcatttatccactggatgccaggaacactttcatttagttgtgatagccaaaaacttcctgaaggcaaaattgcccctggttaaaaactgctgctatagatacacacacagattgtcaggtattagatgaatatagacattagatgcagataactatagatggagacatatacaatatatatatatatgtactggtgtaggtactacttgcttctcatcatgacttcattttcaaagtgataaatgtgaacatagagtctcacaatttaaaatttagtacctggacataaaatagttttagacatttttctcatgccatgttcaaaaatctcagggactgattgattctttttggttcacatgcctccctcagatcaatgaactttactcagggtatatggagtaatataaatacagtaaatcctaacaaaatacgtaaggatggtgtcgtgagaggagtaattaaaagaaagagtcaatgctgttcccctaaaacagaagattacaaagaacctaaatgaaatggaagagggaatgctattacacaatttaatataggagatttttctgagcagaaagcagacagaggtcttcaatgtgaaagggcttcaccaacctcctaaaaaaattaacaaaaataaatacatagattgatgtctagcatatcagttcaatgtatcaactaaaaaatctcaagagaaaagacagtttacctacaacagaatgagtattaatttatattattaatctcatctacagtagctcaaaatagaacaaaatggagctttaattttctgaggggagttgttttcaacctataattttatacctatcaatcaatgaaaataactgggaaatgaaggtattttaagaactcaaaactttcagctcacttcatccagtttaaggatttaatggtgaatttgtttgtaaagataagcaggaaaaaagaaaacatgaggaggggacaacggattcaatgaagtagaaaagcaaagggaagacccagaaggacatttgtgctgagaacctaaattgcaacaaatctagactagaacaggaaatagccatagagaaaagcgtctttcatgggatggtacaaagaatattttagatattattgaaagtatgacaatgtaattgtttaagaaaaataaaggtcatcactaactctaaagaaaacaagctacaagaggatgtgaagcctatacaaagaaaattaaaagaagtcatagtatacatacgtaactaacctgcatgttgtgcacatgtaccctaaaacttcaagtataataaaaaagaaaaaagaagtcataatgttgagctattgctggaaaattcatagaaatatatttccaaatattctcctttaactgacaaagaacttgtaaatttgaaactacagaaaacaaaccctcgaattctgtaatgaattatatttctctaaccacaatattctttttttttttttttttttttcttgagacggagtctcgctctgtcccccaggctggagtgcggtggcgtgatctcagctcactgcaagctccgcctcccgggttcacgccattctcctgcctcagcctcccgagtagctgggactacaggcgcccgccaccacgcccggctaatttttttctatttttagtagaggcgggttttcaccatgttagctgggatggtttctcgatctcctgaccttgtgatccgcccgcctcagcctcccaaagtgctgggattacaggcgtaagccaccgcgcctggccaacaataatattctttttaaaaaagtcaaattttctctttctggttcagatcggttaaataataatttacatatcttaagattcaccttttttagatgtacagtgctatgaggttgataaatgtatacagttctggaaccaataccacaaataagatatggaatgttcatttcatctcaaaaaatttgttcatgtggatttgtatggttctcctcacaatcactgatctcgtttctgtcccattattttttcagaatgtcatatcaatgcaatgagacagtagagagtcttttcttgtatagcttctttcacaagaatactgtcttgggatttatccacataattaaatctatcagaagtgtgtttctttttatcactgataaatatttcatcttatggaaatacaagtatttttaggtattcatcacttgatatgtacttaatttattttcatgtttttggcaatgtatttatcaggatcccatcagaagagatggagtttcaataactgaataacagatttcagaaaaattatgaaaaaaaattatagacatgttaatataaaaagtataattttagtgcatcggtttctagttcaaggggtcataaaatctcaaccagattttaataaactatgataacagccttcagatggaaagcaggtcacataaaaaaaaactgggaattagaatggcatggtaattctcacaggaagcactaactacagagtctgagtaaaaatatttttcacccatcctatactcatacatcttagaaaatacagcatcataaatggaatattggtagaaatacgagcattaaaggcatgcctagtgagggttcataaagaaatgaggaaaatgcttattagaaagtggaggaaaagtaatcgttattatgtagtagcagaaagcttggcggaattgtgtcctacagttagttatgtggaaagcagaacctataggaaatgaactttaatatctagctgaggggatttccaagcaatgtgctgaaggtagagccttgtttcttcccattgcttacagtgaaatgtgagaaaagagagagattgacggaagcggtgttaggaaaaagggaaacaggacctgatgacttgggaaattctcagccaatccagattgcaaaggcactaaaattaggagattcataatcaagaaagcctgttctggacagaaagccaaggtgtggctggacaaccttttgctagtactttggaaggatcaaaggatcagagtattcaattacacacatggccttttgaaaggattagagcagtgaatcatggttcccctcagccctccaagcagaagccaggaatagagatggtattataaaaaaaagatttgtggatgagcctcttgtctagtggagagaatccctgaaacatacagggaatatttgcaagattcttaagaatgttgtgccaacagacatactcaatgtcagcttgaactaaaagggagacagaacaaaaggagggaaggctattgaattctccaaattctacatgtagaaaacaaattgataaaactactcagctgcaaacatgtagagtctctacaatagcagcagagccaggaaacacagagaatgattctcaagctttgaaacctaatgttgaatgcaaaaacagattttgaaattgctcacctctggtgattccttttgtgaactggatatctattagtgttatctgatccctatctcaccatagtattttaggaggcaatatcatgttttatagtttcacagatctcccaacggagaataattttgccccagagtggataatagtgaacgccctaaccatgactaatttagataaattagattacaagatttgggccttccatgataatgagacctatatcctaatttctggaacctgtgaatatgttgtgtgtaaagtacgagactctggggatattaagttaaggatctggagatggagagattattctggattatttgggtagacccaatgtaatcatgaaggtcctacaaaagggaggcaggggtgtaagaatcagaaaagaccatgtgattgaagattggaactgaaagagagagagtgattagcagatatttgctgttggctttgaagatataagataggccacttctacaagtcaaggatgcagaaagtatctagaagctagaaaaggcaaggaaacaaatttttctgtaaaacctttaaaaggaatgcagttctattgatcaattttagacttctaacctccagaactgcatgataatgcatttgtattattttaagacgttaagttgtggcttccccttcctaactccacccgtactaccacagccaccttgtccctctcccattctcctaccttagggtagaaggaatagaggaaaaataaacagaaaccagaaattgtaatgcaatatgaaagatgtgttttatggagttttcagaaacttgaaacaattcaatagaggggtttatcagagttcttagattggggccccattggtgtctttccttcataggatagatgtaaacagggtggacactggaccacacggcagtgtattaaactggtgagtgtcgttcgggggctctatgtcccattctgcaatgtaaggaaccgccatgtaagtagaaggttaagtaatgctgtcgggtttaccagtctggctaaaagtcacagtaggagatccagacacaggtatccttctggaaaatacttgaagaggaggctttctcaaagcaaaagtctccaggccaatacaaagaaatttgtattgttttaaatcatcaactttgtggtaatattttacaatagcagtagggtgctaatatatcatccatactattaatcaagggtgaaagcaacataaaattaccctcagatatagctagatcccaaaattcattttatgtactctttttctaggaggatcttgaaggacgtgtcttccaaacagagtatagttccaaagaagacatggtatcccagcaaccaaatgtacaacacaggagacagatgaatttctcattcttgtaggctaccatttcttttggcttattacaaaacaacaggatgctgcagctttatcaaagtctacttatttgtccactaaaagtttatggctatacgtttccaactagaacatctgaacaccaatatatggaattctgacaaagttaaaaccaggaagagatcctatgaaggctgacattttgtacatctgttttatagaacaataaaaataagaagaacaagaataagaacagcaacaacatttgcagtgagtctgctctctatcaatgagttaaattctttaacacacacatacgcacacacacacacacaaaatgggtttgatatcatttggttattaatcacatgtatagataaggaaactagatttagaaaagtgacataacatgccaatgtcattatattattgaaaaaagaaattcaatgagaattgatgtatttctatttataatttagggctattgtgccagcttcatactagaaaccaccaactcttatcacacaggaaaaaaaaatccagttttacttaaagaataaggaaaagacagaattagccacaaaatcaaatatccccatatgcctagctgaaatctcattagtgtcacaatcattttaaaaatttaaaataagaccactcacctggaggtaaagagccagagcatatatttacttgccatgaaaaatgtttttcttatacatagtgcctaagaagtatgggattttatttcctttttcacagctggaaaggcttagtaaccaattcacttttttagtgtaatatcatctggttttaggcagtgccagaaaagaaatgaaaaaacaattgagcaaaatatatggctttaaatgaatgtaaaccatgtgcatgggtttcatatcaaattctgaaatgttttttcagtttgaatgtgaaactatctaataaggacaacattctagctagagatcaattaacttatttgtgatattgcttttatttaaaagagtaagcaaatatggactgggtgtctattatgtacttgtttctatgatacctttcatttattttataatactaggactaacaacaatgctatagcatcatttgaagcaagtatcctgacttctgtggtagttgtcttgagggcttttttcctaacattttaagagaaaactgagttaggaagatgtattccatccaaaatatttaagcgaactgacctctataagatgatggatgccaataagctaatggatacattcattctcttttcaaagagacaaaatctttttaaaaacatttattactattttggtgcaattagagaggcaaaagtctaattacaagtaaaactaagaacaccagagtgttacgtgaaataggttgattataataaaggtgttctggaaagttataaaagagctgctgcttttgcttccaaagctctaaaatatttaataaattagaaagaaaacacattagttaagtgttaatttcactcaattgtttatccttaatttcaatttccagggggaaattattacttggtttacacagcaggattttttttaaccatacagaagtttcaggaaattattttatagaagtaacgtttcgactactagtggaaggtggcaggttgaggataggaatttacctccttccctcccaatatcctgtggaaatgaagaaaaactcattttaaggtgtgtaaatccaaaacatagttctggaaagcaagaaagagtgctattaattcattgcactaattttgaggactttccagagcataacactgatattggattaaaggagcaacagagtaggaacagtataacccaaaacaaatgcaagatcattgtattggagagagtcatccttcccatctctactttagagaaactaaactctaagtcaacattcacaaagaacagggaatgatcctagggacatttaaaggcagaacctatagaaggttctataaaggcttccataaagtctatagaagaatttagcctaatgtaactccccgtcctgatcaccggctatacagatgagtgagatattcttttgtcaactgctttactgacctcttcccatatacccaagctttatattagagttccacagtgctaggtaatgtgctgtttattattctctatcatctctccaacttgatttaaactttctgtattgcttaagtatcatctatctcttgaagacttccatttttcaagtttccaactcatagctagatttgaagtctgattgcctactgacatgcctactttgatgtttcagggcttctgtagtgactactcattggtcagggttcattcacccattttgtagtaacaattcatcaatcacccttcagagaatcagtagttttccaatcttcccatgttgttcaaattaggttgatttcttttctgctccaagcatcaacctatgttccagatttagtcaatcacatgaatcagttctgatcaatgagagacaaataagtggtttttgcaaaagatatttaaaaaaaagaaaacattactggggtggacaaggtgaaaataatataagcatggattttaaagggcacatgcatgcacacacacatacgaggacacatatagagacacagggcccagtgtagagggacaaagacaaaattgttacaaaacaatttgaacctcatcttctaatgtcttcctcacattatcacatttttgtcacctttgagatgttgccatgtagttggatttctctttaccaggaatgctctgtgatcttggtctttgcctagctgtttccttctcaaacttcaggactcagtttaaatactaactcaagagagattttgctcaactatcactcaaaatggcaccatcaacattctctataaaggctagaagatgtggctgctatatcactgtgtagtggtttcattcatttgtttatttttattatctgtcttttcccttgaaattcaagctccgagtcagtaggcaccaagtctgtgctgttccctgttatagtcctagaagctagattagtgactggcacctagtgtgctcactaaatttttttcttttttttttttgagatggagttttgctcttgttgcccaggctggagtgcaatggcgccacctcggcttagatgtcagcctcccgagtagctgattctcctgtgtcagcctcccgagtagctgggattacaagcatgtgccaccatgcctcagctaattttgtacttttagtagagatgcggtttctccatgttggtcagactggtctcaaactcctgacctcaggtgatcggtccacctcggcctcccaaagtgctgggatgggattacaggcatgagccatcatgcctggcctcactaaatattttctaatgaatgaattaattaattaatgaataaaaacaaaaattgtataactaccaaaacttcagaagttgaagaaagagtcctgaaattataagtacactaaattcctcatcttatataaaaaggacttaataaatattgcataaaattggtaaatttaaaaaggaaggtataattatatcaatgttaggatagcaaatagcagaataatttatactgaaacttaacaggcttcctttcaaatgtagaacttgattaatcatagtgttagtctgcatagtttggtatttttttaatatgtgtgactaagggtgaaggtaaaggaaggaggcttttaaaattaattagatatgcctctgctttatttattgactttttcacatgtatttacttttttcacatgtatttactactctaaattacaacaatcttcatatcaatttagtttaattcatagaataaattcaactcagcactaaaatctgaagtattccctatactataaactgataagcttgtttgttttataacataaatgaaaattacttaaaatatcttactaaaattttaataaaaattcatagaagttggataataaatcagtataaagtacagccatgtattttatgtcactgttttcaagacactagcatatctaaggatgatcaatactttggtcctgctctaaggaagaagaaaaacagaaaaaagctgacattcatttagaagctacctgtatgtggccctctgctatgtccttgtccttcataaattcacacaacaaccctgagagaagattttgtagtgaaagggacattcagatattgggaaactactctaagtttctacagttaaacatgtaacaaaactaggtttcactttttttttttttctggcctattctatttccctataacatattgtttttattacaaaaacatgaacattttgaaaatttgtatttaaaagcgtaagatgcttactttaaggtttattttcattttatgctatttctatttgtcatttaaatatgtgatgtttctttatacctatgttgccctaacataaagtatattttggagaaaatacgttatatatttatggaggtaggcaggtatgtatgtgtttatccaatttatttggagtgaagttgagcacattccttagtattttttttttcagtgaaaaatgtaggactatcttcaatggtaaaaagtgaagaaaaacattagtggtttttgaaacacaatgtttcaacaaacatgtaagtgaaatgtacttcgggcaatgagatttgttgattgtgtgatatagacagatatttgtgaagatggatttggctttggtaaagggaaattaatttataatatttaaaatagagttattacaactgattattacaaaataatttgactttttacttatgccaacactcagattctgaagaaagctcagcaacattgtgcaatatcaattctttcctactctttgcataaataacattttttccatgtgcaggaaatttgcaaatttccaaatggaggatttgaatatactcatactccactaactaaaaacagttatatgtttttcatgagccctatagcaattcttatattggaagatgcatattgaccagtgatggtttggctctgtgtccctacccaaatctcatcttgaattgtaatcaccatgcgttgagggagggacatgtaatccccatgtgtggagggagggtgttgattaaatcaccggggcagtttcccccatgctgctctcatgatagtgtgtgaggtctcaggagatctgatggttttatcagtttcttgcattcccctcttacaattctatctcctgctgccatatgaaggaggtccttgcttccctttgccttctgccataattgcgagtttcctgcagcctccccagctatgtggagctgtgagtcaattaaacttccctcctttataaattacctagtctctggtgtgagaatgaactaatacaaccacataatcaaaaagtcaaatctgaaggtcatgttgaaagagatgccacggattgtttaccaaaagcaaaagaaaggtaaaaattaatctgtctgcttcatgtatttgtcccctaagagtgatatggctttgagatttcctcaatgaaaacatccatgtcatactaataaggaaaagttatgtctgagtaaatttaaattattatgtttatttaaatattcagataacattactttatatcactagttaatatcattcaaagtttattgatatttaatttcatatgggattgtcttcaataatttggaaaactcttccaaatttgacaatcttcaagtctaaagttagaggtaaagcaaatatgcgtgtaactatgtaaaaattatttgaaagctagtgtgtgtgtgtgtgcgtgtatatttgaatcatgaggttctttgacacttaccttttacaaaaaaatttgtattatttagtttttagttcagattctgggattgaagacttcagaatacttacattgagcatgctaggtaattatcctttatgttagagatatgggttggaagtcagaaaaaaaaaacagggagagtagaggacaacatgttcattcagctcatgttctctctttataaataagcaattgaatactaagtaccttacaaattacttctattgtttgcatcctgttttagtctgttctcaccctgctattaaaaacatacccaagactgggtaatttataaaggaaagaggtttaattgactcatagttccacatggctggggagacctcacaatcatggtggaaagcgaatgaagagcaaagtcatgtcttacacagccgcaggcaagagagcttgcgcaggtgaactcccatgtataaaaccatcagatcttgtgagacttattcactatcaggagaacagtatgggggagactcccccatgattcaattatctccacctggccccacccttgacatgtggagattattaccattcaatgtgagatttggatggggacacagagccaaaccatattaggtgttcaaagtaaataagccctgagaaactcaaataaaaccattgattaacattaagtacttgttattgaaacaaaacacacagctatccttttataattaagtaaatatttaatgtctgtgtttatgtagaaatatacactatgttgtaaatttatgtgcaggatttttttttaattcttcaattaattttatgcctgaaatttcaaatcatagttttaaagctgaaataggtaaataggtgctgaaattcattatgttgatttatgctgagtacatgtcccagttgccaactattgcatgacaaataaaagcaaacttagtgctgtaaagaatgactactttattgtgtacccagattctgtaggtcaagaattcagtgtgccagcaggaatggcttgtttctgattcatggtatctggtgacttaacaggcaagatttcaattgctaggagtaactgcaacctagaatcatctggatactttttcatatacatgtctgacaaaaccagattgggaggattcaaagaccaggctcaggtggggctgtcaactgaggatctaccctggctcctgtcacaattccatgtgatgtgaacctcactgaagcatgtcacattacaatagttggtctttctatatggaagcttaaggctctactgtgatcagaatgtttgtaccccctcataattcatatgctgaaattctcaccttcaaggtgatggttaggatgtgggcctttgggaaactgatgaggtcatgaaagaggagccctcataaatgggatttgtgcctcttttccccttcccccatgtaaggatatagcaacagggcaccatctatgaaaaaagaaacaggccctcaacagacaaaatctgttggcatcttgattttggactttccagcctctataaacatgaggaatacatttctgttgtttataagctgcccagtttatgttattttgttatagaagcctgaatggactaagacaggcttctgaatgaaatgtttcaatgaatacagcagaagtttcatggcattttatgacatagcttaggaagtcaaatagtatcttctgctatattttattggttatgacagtcaattcaaaggagaaggatacatccctatgtcttgctggaagattatcaaagaatttgtggccatgttttaaaatcactagagtcggccttctgttcacaaatgatttgcatttcctccacatgcaaattcacttctttccgaaaccctccctcctaaagtctcatttcattccagtatcatcaggttcagactcaaggttcaaaatctcaatctcaatcaagtccaggtgtccataatacttcccaggtataattgctcttgatgcacaaaaaaaatgaagtatcttcctctcctcacacccagcgtacaatggtgagagaatcaaggacaatgtaaaagaaaagacctatcagaataattgcatttaatgtaaagttattcagttatttctgccatatgcaaattccaatgattatattttaatatgaccaattttgaaatgtaattttaagtatttcatacttacagatatctactcatcatcagcattggcacattatcaataagatgtcattatttcaaagtggcaaaggaagatattttaaaactgtattcaatttcccagaaacaaaaagatgaagacaaaagctagatgatcaaacagttttaaaaatattgccaatagcttaacaatataagacatgtgtggaagggaaaacttgctgaagcttgaattgtgtcttctgggaaataaaaggggcaatgactaattgccacaggatattggcaattgcagatgccaggttgtttcacaaaaataggaaaaaaataaaactaccaatctcagatactttacttcacaaactaagagccaattcctttgatcttaaatattataataatcacaatgtatcccaaggtaaagaaaataatactatgcagtgatcatggaaggataaaaatattagtaggtatatgctacgacacaaagcctttggtagaaaacattctaatctggaaatcaatgacacaatggcaaaatattgcaattctgagcaggaaataaagaaatgctttttattgttctttagttccagaaataataacaatagaaatagggtgattatgtggattaagtcaatcaagatttttttctagtcagattgtataagtacttgaactatacagaaattaaaatacaaggaagacaaaacttcatggcctggagtctgtgagaatcctctattgactcaagtccggtgtttgaattaaacaaatcccatctgttccagttctactatcttgaagtcaataaatttttattctaatatttaaagttacaatatcagactccatttgataataccagtatgtttaaactctggcccatttccaacattttacattactccattgctgtacttacaacatctgacttgagtacaactatctgatttggcttggtgtatatttcactggtgtactcacctgctcccttgatgattctaataacacggtctccaaagaatggacagaaattcctggagaaaacagtgtgctcctaaaaattaagtagaattttcttccgggtattgccctggcaaaaggaggtaagagaggggattccctgacagtgtacaggaatttccactgcatttcctcagaagtgcagggaaatcagaaacttctaacagtcattcaagagtagagataattaaggggaatataataatttaccaattttaaaaagagacatattatatggttcataggacctagtagtaatcaagtttaaaaaatcagtacataaataacttgaatatatctacttatatgttatctatctatctatctatctatctatctatctatctatctatctatctatgtaaactttataataccagagaacagaaactgatttgttttttattagtttgttttccccccggaaacattaatggcattggaatgtactctggtttaggcaactaagatgtttctgaaaaggaattgcttaaatgaaattacagtaaattatttattaaagagaaatttaaaacaagttatattctataagtaaataattcaggtctcatatgatggttttaaaacaatatttcgttttgtgtcttaggttttctggtagtaaaacaatttgattagatagacgatagacaggtagttatcattaaacagcacagtatttcaaataaagttccccacagtgaatattagcagattttaccatattataaatttttcaaacataattatatgaacattaaaactaaagattataaagtgacaagtattgtagttcatgaaattctttccagaacatgcctgactagacaataagcacacacactaaatattcactgttgtaacttaagatgatagcttgtacacaaaaacattgaagagttttgagataattttgaaaatacctaaataagcaatatttacatattatggctcagggaatagatattaacaaaaattatcctctctcaggccactgtctagaccacaggaaacctggtcaacaacatatgggatgtcaccagattcagactcagaagtttccataatgccgttgccaacagctagacacagtgagtcatgggggccccagtaaccaaactctcatcacacacaggctgtttagatagtgatggaactaacatgaaataaaatcaggccaaataacatcttaaggttctaaagaaatattttagattcaacagatcttctaaattcagcagtatccagaaagttttgccagagcaagagaagtataataaattagaaacaagttactttccgcaactcaggttgctttgaaaaagaaattattacaagaaaaggatttaatctagacagttacaggtagtcacatccatgtcaatatttatatctctgtctatatagtaagcttgatatctgtgtacatcagtgaataatagtacctacctcaaatgaaattaaataaaaaacaaatgagataccacaattgaagttgattagcatgttagttgtgtaaacagtcacatgtgagcacaagtgtgcacacactacttttattgggtccttatatttcttggaaaaaaattacatttatatttaccagaggagcagagttataaaacatagcaatatgctattccacatacaacaataagcatgtcttggaaggcaagctagatcaaaaactgacgtataagatggagtttagaaatcaactgtaattatatgtctggaaaattcatgcactttagggaaatctagctcctgccagctttatttgtatgctgtgatttatcttaaagtaacgtcatgcctcatgccagtgactgattcaacacataacattctacaagtcacaggagtccattcaggaaggaacgatatgtgactcactcactatcatgagaacagcaagagggaataatcaccataatcagcacctcccaccagacccctcctccaattccacatggaggaagaatttgggcagggacataaatccaaaccatatcaaccgtgcttttacataacctacctttgtcacccagattttcagtaaaactttccctcattcatcaccaatgtgttcaaggcacttcagggagaaaagtatttcaatatattatttagaaagggaagaataagttcaaaatacatgaacctgatatggatactggtcaggagaaaacaaacccactggacaaacttggaaagacaggggaggttttttgcacatgagtggggacaatgtttcatgactcggatgagctgatgagttggatgatgtttcacgagttggatgagtagggaataaacatagcagatctaaggaaacaggaacacactgcacatacagtgtatgtgtaattatgcacatacagcagctgtaaaatgtagtctatccagtgggaaataagattctttaaatgtaaatattctctaaaaggcacgttacttacctgaagtttttctgatttgaacatgtatgttcttagttgcaagtattggttgagtcacatagttcatgtataagtgtatataaggggtgtgaaatggggatataataaacataagaaatgtatataaatactcttctctatatgataaaactaaacatattccaatatacaattcttatgtacatctaatatggaaacagtacaacaaagataatataatatagtccactcactactcaccaaagagatggtgagaatcctaatctagaagaaccaatagaaaaataatagtgcgttatgctcatcttctctttttcgtattatgtcctctgctaattcttaaactttatagcactatcattacatgtaatctgcacattttatagtttttactataacttacagtttgattttagagttgaaaggcacataaatcattttaagtagagtatttacacagattttatttctacctactatgaagtgcaaaatgccaatagcatactttcctgactaaccgggggtagcttttcttttattctttgtccctggaaatcactcagacactggtgttccatgaagtacctagttagggagtgtacctagttagggactgttctcatgctgctaataaagatataattgagaatgggaaatttataaagaaaaagaggtttaatggactcacagtttcacatggctgaggtggcctcaatcatggcggaaaatgaaggaggagcaaaggcacatcttacatggcagcaaagagagcatgtgcaagggaatttccctttataaaatcatcagatctcatgagacttaatcactatcacaagaacagcatgggaaaaacctccccatgattcaattacctcctactgggtccctcctacaacaggtaccatcttcagttaaaatacctacattaaccagccacattccctctgaacaagggcttaaacttagaaaaatatgatgacaagtaggactgcactgcaagcaagaaaaataaaatatgatttctaacttttccattccttcgtgttggaaataaaaaaataataaatcattgttactgatgccagattttgtgtaaagagttaatgcttatgtgaatcaaaatagatttataaacctttcaacactgcagcttggccttagaacctttcctgagatacctccttttttttgtgaaagcagatggcacacatatatgcaaattaaaaatagactttggttataaaacaaaaaaataagattcaacaagctcaacttaaattattagctcagcacaggcgagtccaacagtagctatcattaaattcagaccggcccaccattgtaagaaagacagtaatagttatgcagtatctgcaaggcattttgaatccattacataaaaatgtgtgcttggaatactatgctatagtaagcattatgagactatgcccacttttaccctgaggagtgtaattaagtgcaatgctcaaatgaatggtttgcagtgacatgtattatcctcctaagctggctcaaaagaagctctgagtctgtgctatagcactcacttctacctatctttaacatgtattatgttcccttaagcctctgggaacgattcaatgaaaatgtgttgcttgcctcagttcacattatcttatggcagccacaaaccttagactatttttacacagattctcagttttcctagttgaaatataagactattaaaatgagaagaaactaattgaatacagcagatcattttatgtaagtgtttgaagctgcctcaatttgacttctgcacagttactactttaaggagtaagctgagaacatgaaattgcatgtcttcaaacagtctaatgacatctataattccataatagtttgaccaaaatcactgccggatatatagcacaaaattaatctcatacaatgagggtatgttgacattttcaggtcgacctgggctaatgaacttcttgcattatttgatgtggagtttccaattgaatacgataaatttggggatgaaaattgttactgaaacatcaaagatattcctttataaaagtgaactcatatcagacctactcagaaacccagttaatttataagaatgtataaatcctacataggtgttaaatggagactaggaagggtggagtgagaggagagtgaatgataagaaattacctaaggggtacaatgtatgttattcaggtaatggatgcattaaagccctgattttaccactatgcaataatccataaattaaaattatacttgtacctcataaatttatacaaaaaacaatgttataggccacgagcaacatcagtgaaataagtaacaattttaaatcccaagttttttcagcatttcaactaatatttatggagtttgcaaatattgtaatatatttgtttaaaagtttagattaatttatataaaaatatatcttctatgataacatttactctctgaagattatgagtttaggaaagtaaaatatggataagaacaaccatgtgataaaaatctggactattaaaaaaataagaaaaaattacagtaccaaatctatttttctggtacaaataacttgattataatttacttccaacacagtaaaatagtaatataagggaaagatgctttacttttgaagttcaggcatctttatttaaagttcattaaaatttctcatatgcttccagaatgtattatatttacaagtaaccttgtgcccaaacgtctagttaaatattgctactgtttcactattttttttccttgggttttattaaaatgactgtctttatcgtttttcataaatatgtgtaatcctttcctgctagagcattatagtgttcatgcagttgaactcaaatggcaagctagctttatacaataaagtgtgaatggaaatgacaagctcgccttattcctgtgaattgacacctgccattgttccagagagagtactctatctgtgttcttgagtggagatgatgaagattagaactatacctgagttgtgatgaacatggaaagtgatttggagagttgcacttttcttggtatgagccagttacttggacatcatgggcaaatgatttctctgttcattttctgtcatttccaaccccagctgctgttttccagatatttctcaagttttcttgtcctgctgatgttatattttttttccagaaacctgagcctgagaatttgcttatggattgtatatgatgccaggaaatggaatagaggactgggaagagtgagagaaggaagagaagccaggaggagagtatgttacgagctgtgaataattgggacttgattccactgagctcctttgaagtatctgagaatttgactgcagaattgtgaacctgaaaatcacagaaaagagaatatttatctattgaaccttctcttcatcttgcattggtcaagagttgtcctacgggatattaagacacttgcactttcaagtttgcagaagtatgggaacgaaagcatccaaaaagccctgaggcaggaagcaagctgagacaaggtgttggtgatgatggtacacctggatgaagctaacttcagcagcaatagttgctgaatgaatttttcatttcatctaagttgccacattcatcagcataaaattgttaatgatattcttttagaacttggagggtggtaggagagagaggagcagaaaaaaataactattggatatgagccttaatacctgggttttgacataatctgtacaacaaacctccatgaaacaagtttacctatataacaaaccttcacatgcacccccaaatctaaaataaaagttgaagcaacaaaacaaactaagaatttctatttcttctcttgcacgcctgatattggcaatgtgtcttctcatcatatttttcttgatccaagtttgcaagagatagttttgtcaaccttttcatataattcactttttactttgttaatttcttaaattatatctccattttcttttttatttatgtattcttttagtattctttcctatgccttttggtttgatttcttctgttttcctaagctgtgaatcaggaagattcaattatttgctttcagcaattctacttctatagtattataagagtgattatatatataataagttgatgtataaaataatatttaatatttaaataatgtatatatacaaaagaattatagagctattaattccatctaaatgctttattagctgtgtctcacaaattttatgtcatgtttctattaatattcattttcaattcccctcatgatttcttttttgataaatgtgttaattaaaagggtgttgtttaatgtccaaatatgtgagacttttctgattgtattgttttatttatttttgattcaatcccatcatgtttaaatattattagtaccagtaaaatactctgtataatttcgatgtcttaaaatttattgaacctttatgtgtctttatagagtctaccctggtaaatccgttacttgcaccttggaataatatatactctgcccttgttgactgaggtactgtataaacatcaatgaaatcaaaatagttgatgatatttaatgtatcatttagacctttaaaatgttggtgatttttctttagttgttttatccattgttgagaaagaggtactaatgtcttcaattataattatcaaactatctctacttttaattctgtccatttttccttcatgccactgaaagctctgatatattgaattcatagatgttcatggtgctatgccttcctgatgagtaaactgatatcattgtgaaatttccctttttatttttggtaataactaatttcttgaaatgtttctttaaaatgtaactactccgatattcttatgcttaaagcttgcattaaaaatatttttctattcacttactttcaacctacatttttctttaaaataaaacatactatttttagatagcagaaaacttggtgttgtttttcaattcgttctgaaaatacgaattttacttggattaattcattaacaattaatgtaactactgatatggttatgttgtgggtggtttcctacgttttctgcttttttctctgtcttaacttggttcttttttcttttttcttttcttttcttcttcttttttttttttgatggagttttgctctgtctcctaggctggagtgcaatggcaagatctcggctcacagcaaccttcacatcccgggttcaagtgattctcctgcctcagcctcccgagtagctgggattacaggcacatgccaccatgtccggctaattttttgtatctttagtacagacggggtttcaccatgttggccaggctggtctcaaattcctgacctcgtgatccgcccgcctcggcctcccaaggtgctgggattacaggtgtaagccaccacgcctggccagaaaaacatccttttcatctactcagatagttaccgattcagattttttttcctctattttgagaatacatcttttctgtgctatcattttctttcagcctacagaaattcccttaacatttcttgtagtgcaaatatgctggtgataatgtacccttaattcttttatctgacaatatttatatttcaccttcattattgaaagatgttttgctgagtatagaattctgggttgataatttgtgtgtgtgtatatatatacatatatatatgtagcttgtatatatatacatattatatatattagaagataaaaatgtcttacagcattgaaaagctatatgtatatatagttcaaaatgtatttgaaattaagtatatgtatatatatatatatatatatatatatatatatatatatatagcttttcaacactgtaagacgttgtttctgtcttctgttcgtaatgttctggagtaatgcataaaaacatacatacacatccttgtgtatgcaatatctgattatgcagaattctgagaagttcaaatatatatagcttttctacactgtaatacattgtttctatcttctcttcacaaattcgggtaagaaattagctattaattggaatcttgtctcctatatgtaacatgttgattttatcttgtcactttcaggatatatactttatctttggctttcaaatatttgacagcaatgcacctaacttcgagcttattttctttttttttttctacttgatatccatcaagcatattatatctgcaaatgtatatctatcatcaaacttggaaaatataaaagtttcttaaataattttttctcaattttcttttttctactattataattacacatttgttgcactgagatcaagataatcaaacaagcccctaagtctctgttcatctttttaaatttttttcttactgttttacatcttatataattttagttgatttatcttactttactctgtcatgcttattcagttatcaattccaatctaggaaaattcctttactttagaaatttgatttttagttctagaaaaactaattaattcctttttattgtttatttttccccatttggcatacctattgtgccacagaaccaatttccaggatgaagcagaaaaccagaaatatttacaaaaggaactttgagagaaaaaacaaaatgcatttttacaaaggtggttatgtaatattcatggatatttttgccatatatttggctatcataacttagggcaacttgaatgtattagtaaaatattatggaaatgctatggtacttttgttactaggtaacatagttcactaacataagtattgttaactcttggaaagtggccatgttatgagtgtatgctcaattatctaatttgtaaagaatcttaattaaaaaggaacttaggggagtgttccatagatatttttaatgccatcatgggactactgaactaattttactgctatcatagtattatggaaaggtacagaattgtaactagaaaaggtagaaaagtgtttatgtaagtacttaagtgatgttcacataatgaaacctcacatacatattagacattagcaacagataaagtatagcaatatttcatgtgtttcttagaaaacagtgacgttaagattaggttgatatatacttattgttaaattgaaggattttaactatcaaaataccttaataataaaaataatattgtgatttgattgtgtaaaaacatttttggtcttacgttagataaactggtaatgttctggaataatgcatgaaaacatacatacacatccttgtgtctatacagaacagtgcgtacaaacagcattttacctgataagtgatctcattttcctcaacctagaagtaagccacaacacttctgtgtagccttcgtagaattgtcataggttaaagctgctgcacattgatcacagaaggatatctcagatatgtatgcagtatctgattatgcagaattctgagaggttcaaaatatatttgaaatacagtatttagaaggagtgggattctaaagtgaacttgtccacgatttcagttaagacagcaaaaataacacagtataaccatacgtacaataacacaatcatagctcaaaaacaaaaatgagagccataaagatgaaaagacaaaatcattgtagacaggaaaggctattctgtcaatctagttcccaattcttcttcttttcttttctttttaaaaaaatattaaattgactaataaaacatacatttattatgtacaacatgttgttttgaaatatatatatatagtgaaatggctaaatttagctaattaataaatgaattacctcacacacatttttgtggtgaaaatatttaaaatctattctttcagcaattttcaagaatataatacattattatgaactacagtcaccatgttgtacaatagaagtttctaattattttctacaaaattttatttttctttacatcattgagttttacttttattttctttatttcactcaacttttaaggattccctactttccttctttgatttctggtctacaatgcaataaagaacattttcccattagtacaaaataaagataaattatgataatcattattataataatatataagtcaggcttcttctacagcaaataattaagattcatcttgactaaattaataccccatcaccaaaaagttttgtttgtgtttgttggggaagcagttgattgatttcattaacttagaggatcagagagtcaatttcagttatagctctttctaataactcaactgatatcagaaaatccctactcagctctccatttaaaaaaaaaattttttttgttaaattttatttttgtactaaaactaccatgagttcaatatatttgtttttccttttttcttcaagtttcattcagcatagggaaggtatcagtacccatctccagacttacaaaataactggtctatgatcttggcaagtctttcatctgtcattggaaaattcatgaaaaactctatttaaacttgcttctgttacctgcctaatcttctaacatttattgtgaccctggtctcatcataccctgccaaggcttcggtcatgagcttaacccttatagaaggagtgagatactggacaggttcaaccccaccaaaggcacatagaaaggatgttcacaggaaaggttttctctgataccaaaggagaggatgcatgggataaaacaagagatttctaccctaaattatgataataaaaatatattcccttttaaaaaatataaatgaatcctaaaactaatgaagtgaatcatatttaaagcaaaatgaaaagattggatttgcacgttatttaatgctaagaaaattacttttttataaatatgttctatgttcttgggttcagcatcgagatgcctttgctgaacaatacttattggtgccttaaagtccatgaaaagtttttaaacttagtttcaaattttagaataaacctttccttacattctcttttttcatttttttaacattttagtccaaaatcagatggccttttatatgacaacatcttcaactggcaaaaaaaaaatcatattttcataagtagacaattcaaattattcaaagcagtattaattttatctgacatcttatgttagaaaatgtattaggatgaattataatgtggtagaaaggaaaaagttgtcataatatgcaacagtatttttaattggacacttacaaatgtttttaaaaattatattaaaatggaatgttagaacaggctacattaagtttcagtaacaaatgacttccaaatctcagtattgtagttctattatttttttcacttatataaagtgtttgttcaagccattctgcagggaaacttttcttcatgggttgacttagcctttgacattgcttcaatcttatagaaactgcatattaatatgtagtttacctattgccattttagagaaagagagcactagagagttctagcaataaaattattatactcacttgtcatttacttacgtgtaattagccaagatattacactcccatacctcccttgaaagaggtaagggttctattctaatatgacataaaaggtgaagaaaaccagactttttaaagcggatttgtgtgagaaataaaaagctttttatgtatgtgtgtgtatatatttatatatatcttctatctctatattttcttaccaatttgtgtgtatctgtgtgtgtatttatatacaaacaccattgtaaaatgtattcttaattatatactactagtagcaggtatgctaaaggcagtactacatgtgttttcacctattaaccattaatattggcctgaatctgctagttagtgtaattttcacaaaacaaaataaatgtttaaatgtgaatacttgaaataaagacctactagcatttttgcaaacacttgatttgcatgcctggaaataaggcaattaaatgaaaacttttaagaaagagtgcatattcactaaccgggacagttaaaaattaatatattttgtagaaaccctgagcacttgttgccccccacaaagacagccaaaacaataaatgcaaaagtacatgctgatgaaaataactaaaggaaagcttacagtacataaaacgagtaacaaaaaccctggtgggcataggaaatcagtatggccacatggagaatggaagaaaacacttggactgcaccacaccattccccagcctggatcagctgggaaccaggagaaacctctcttggggaaatgtggggaaaaggtaagcaaagagaatcccagcagcccccatcaacacctggggagcctccaatcctcatcactggggatatctgcagtcctcacagacactaagcttagctgaaagaactgcttgaagtccacataactgtgcttcccccagagaaggagctgatcctgtgacctgtgtgtctaccgcactgtgccgtcttggaactggaactattttgttctggggggctagtggccatggcaccctttcatccctgaggcgaagctgccgccaaaccacccttcctggtgactctacattcccaagccaagctgtgagccactgttacacattgcgccatggagccaagcagagtcgaactgctccaccaactcctaccagtcagagctgcattccaggccctcagatctgagctaaagctgtgcatttcctcctgtgctttggcagagctgtttcatccacctcacccatttgctgctgtaccctgcgacattgtgctggagctgaagcaatgactggcatcccaagaaacaatgcctatgctgcccagagaatcacaaaccccagaacataacaaaaaaggaaactataggccaatattactgatgaatacagatgcaacaaattctcaaaaaatactagtaagttgaatccagcagcatgttaaaaagatcatccaccatgatcctgaatgactactgggtacataacgaaatgaaggcagaaataaagatgttctttgaaaccaacgagaacaaacacacaacataccagtatctctgggacacatttaaagcagtgtgtagagggaaatttatagcactaaatgcccacaagagaaagcaggaaagatctaaaattgacactctaatatcacaattaaaagaactagagaaacaagagcaaacacattcaaaagctagcagaaggcaagaaataactaagatcagagcagaactgaaggaaatagagacacaaaaaacccttcaaaaaatcaatgaatccaggagctggttttttgaaaagatcaacaaaattgacagactgctagcaagacaaataagaaaggagagaagaatcaaatagacacaataaaaaatgataaaggggatatcaccaccaatcccacagaaatgctaactaccatcagagaatactgtaaacacctctatgcaaataaactagaaaatctagaagaaatggatacattcttcgacatatacaccctcccaagactaaaccaggaagaagttgaatctctgaatagaccaataataggctctgaaattgaggcaataaataatagcctaccaaccaaaaaaagtccaggaccagacggattcacagccgacttctatcagaggtacaaggaggagctggtaccattccttctgaaactattccaattaatagaaaaagagggaatcctccctaactcattttatgaggccagcatcatcctgataccaaagccgggcagagacacaacaaaaaaaagagaattttagaccaatatccctgatgaacatcgatgcaaaaatcctcaataaaatactggcaaaacgaatccagcagcacatcaaaaagcttatccaccatgatcaagtgggcttcatccctgggatgcaaggctggttcaacatacaaaaatcaataaacgtaatccagcatataaacagaaccaacgacaaaaaccacatgattatctcaatagatgcagaaaaggccttcgacaaaattcaacagcccttcatgctaaaaactctcaataaattaggtattgatggaatgtatctctaaataataagagctatttatgacaaacccacagccaatgacttactgaatgggcaaaacttggaagcattccctttgaaaactggcacaagacagtgatgccctctctcaccactcctattcaacatagtgttggaagttctggccagggcaatcaggcaggagaaagaaataaagggcattcaattaggaaaagaggaagtcaaattgtccctgtttgcagatgcatgattgtatatctagaaaaccccatcatctcagcccagaatctccttaagctgataagcaacttcagcaaagtctcaggatacaaaatcaatgtgcaaaaatcacaagcattcttatacaccaataacagacaaacagagagccaaatcatgagtgaactcccactcacaattgcttcaaagagaataaaatacctgggaatccagcttacaagggatgtgaaggacctcttcaaggagaactacaaaccactgctcaacaaaataaaagaggacacaaacaaatggaagaacattccaagcttatggataggaagaatcaacatcatgaaaatggccatactgcccaaggtaatttatagatgtaatgccatccccgtcaagctaccaatcactttcttcacagaattggaaaaaactactttaaagttcatatggaaccaaaaaagcgcctgcattgccaagtcaatcctaagccaaaagaacaaagcaggaggcatcacactacctgacttcaaactatgctaccaggctacagtaaccaaaatagcatggtactggtaccaaaacagagatatagatcaatggaacagaacagagccctcagaaataataccacacatctacaactgtctgatctttgacaaacctgacaaaaaataagaaatggggaaaggattccctatttaaaaaatggtgctgggaaaactggctagccatatgtaggaagctgaaacgggatcccttccttacaccttatacaaaaattaattcaagatggattaaagacttaaatgttagacctgaaaccataaaaaccctagaagaaaacctaggcaataccattcaggacataggcatgagcaaggacttcatgtctaaaacaccaaaagtaatggcaacaaaagccaaaattgactaatgggatctaattaaactaaagagcttctgcacagcaaaagaaactaccatcagagagaacaggcaacctacagaatgggagaaaatttttgcaatctactcatctgacaaagggctaatacccagaatctatacagaactcaaacaaatatacaagaaaaaaacaaacaaacccatcaaaaagtgggcgaaggagaacagtatgttaaataaaataagccaagcacagaaagataaacacacctctgttttacccatatgtggaagctacagtgttgatatagaagtaaagagcaaaacagtgattactagaggctggaaagagtgtgggaaggagagatagtgagagattggttaacatacacaaaattacagctttaaaggtgggataagttctagttttctatagcactgtaggatgagtataattaacaataatttgttgaatattttcaaatatctagaagaacagatatcgaatgttcccaacacaaagaaattataaatgtttgatatgatggttatgcttattaccctaatttgatcatgtatatgtgcatcaaactaacacactgtttccgcaaaaagtacaattattatgagtcaatttaaaataataataaaaacaggccaggtgccgtggctcatgcctgtgatgccagcactttggaaggccaaggagggtggatcacgtgaggccaggagttcgagatcagcccggctaacatggtgaaaccccatctctactataaatacaaaaattagctgggtgtggtggcacacgtctgtagtcccagctactcaggaggctggggcacgacaattacttgaacccaagaggcagaggttgcagtgagccggggatcacaccactgcactccagcctgggcaacagagtgagactctatttcaaataataataataatcataaacaaaaaagaaaatgaatgaaaattaacatattaaaaagtaataaacgttattaaagtaaacctatataaatatttttcatgcatgaaaacaatagccactctgaaaatattctaaacctaaagaaaatatttttgtagtgatttaattaagaatggattaataccaaggagtaaattttaaaagctataagaataaacaaatatacggtaagatgtaggtagtaaggatgggcacagtggcttatgcctgtaatcccagcactttgggagactgaggcgggaggatttcttgagtccaggactcaagagtcaagaacaccctggcaacataatgagaccccagctctacaaaaaataaaaaagcagctgggtatggtggtgagtgcctgtggtcccagctactagacaggctgaggtgggaggattgcttgagcctggatggttgaggctctggtaagatgtaatcacaccactgcactggagcctggacaacagtaaaatcctgtctcaaaaaaaaaaaaaaccaatacaggtggtaaataaaagtacaaaaattataaattttgagcataacataaatatatttaaaaattatttgagagattaagaataataactgggaaatattttgaaaattatgaacattagggatgactttacatatttgcaggaagaaatcctgttaggtgtgtttacaccttaataagaaaatgctgtttttaaatatattggtagcaatgatcataacaagaggcattgctgttgaaaactgtctttattaaattcagagttttacttacagttagtccaagatatttttttgtagggcactcagatactttaaaaagaacaggcaaagagatgaatatatgtaagaaatctagataaaacaaacaaaaagcattcagatcacatacaagtgacttaaagaggtatttcagagccaaacaaaaagctgggatctccaaatagtctctggataggaccaaagggaaattcctctttgctacttgaataaatttatgcttaggactcaagagaccccaagaaagtatgagtggaggcctatccctaacccctgcagaagtggcaactgataatccatgctgggttgttctttccctgatcttagtccaatctgcccattctcctaatatctagcttggacgatgcttgcccacagatatcagtgtgacctttaaaaaacatacataaatgccatatttcgttaagaattagtctcaaaggcctgtcaacagaaatacaaagaacacatttttgtgatcagaaaattggtctgatagtcataaactcttgtatttttttttttattttgttttgtgtatatttgttgagacaggatcttgctgtgtctcccaggctggagtacagcattgcaatcatagttcactgcagcttcaaactcctggcatcaaatgatcctcccatcttggcctcccaaagtgcaggaattatgagtgtgagccactgtgcctggcctcatgaattcttattatttaaatctatttaacttaatcatcaccacacaggtttgtgagaagagaaagctgggtggctaatgggtagggaaatagttggaagagacacagagagatactgctgacagtgatgggcgctgggtaatgaaaaatcttctacagtaaccttgatccaagtcctagaccaaaagtagcaataaggttctagtctcctcttacttcacgttacctctgtgatttcaggaaaagcaatcatcaatttctggcattaattttctcaccttgggaaaaaagaggtaatattttgaaataacgcacgtggacgtgctttcttgtttcaaatgctccgaggttggggttagtgttattatcaaatgtttattgaaatcaatcaaagttggctcctgctcctagttttataatggcaatatgataatcaataaaccctagccagacttaggttatttacaagctgtgtggaagattaaaggatccaactataatgacagcattgttgtgattattaccattatgtcagctaagcaggcaaaaacattttaattttacttaaatggctacaatgagattagaaaggacacatttttgaaaaggataatattagaaatatataaaaaccactttcctggagttgactaaaacaaatgtttaattgactctccatgatatgaattatcagttcatatactcctgttaagtcagttatgatcttttactgaagccagtctcctctttaactttttcttctcactagctgagtgatcctggataaagtctttagcaatatagacttcagcttctttgtctacactttgaatctgttggcttacatgcctcttgttttattattctatgattctctcactctttattttgcatggctaaacttggaccaatcacatagagaggaatgacatgggcctttccagtagatctgataccctaaaggaagccactgaccacccttcatgattgtagtgctgcatctatgatgaaaccattttgtaatgagcttggaattcttgatcacattttcaaaataatatgtgtattagttcattttcacactgctataaagaaataccccaaattgggtaatttataaaggaaagaagtttaattgactcacagttctgcatggctggagaagtctcaggaaacttaaaatcatgacggatggcagctcttcacaaggcagaaggagagagaagtgtgtgacagcgcaggaaaagctaccatttataaaaccatcagatctcctgagaattcactatcatgagaacaacatgggggaaactgctctcattaatcaattccatctctccctcgatgcatgtggattgcatttcaagatgggatttgggtggggacatgaagcctaaccacatcaacatacttcaattttataatgtcttatcttttgttaattactgtacacatgcaagaagtaattatcaattctatgaaaggcaggtttaatctttagggacagaaagcagattagtgtttatctacagcaaagtgttctgagaagtgattgactaaaaaggtgccaaacaaacctttcggaggtgatgattgtgttctatgtcttgattatacttgtgagaccacaggtgtatgcatttctttaatctcatcacactatccatttgaaataggtatatttctttttatcttattcatacctcaatcaagttgatttaaagaagaaataatacacctagggtttttactattgttgtcgtattatctttcttttgatctcttcttggtcacatgattaattataaaaataagaaatagaattcaatatcttcatccatgccacagttgcctattagagtatgaacatatccttcatatatttatctactccctcaacttttgattaaaatattttgatgtttagtttttaggtcaaattacttaatgagcaaattatcatgaaaatgtgtaagtcattttatcatctttgtcttctccatatgtctattaaaaatttaaatatatgcaaacaaataatgtgccaggagcacacctggtatgttttaggtgtttaataaatgttggttgaatgaataaacaagcatcactgtcctgcctacagccacatccctactttctttgacaatacaaatttgcaaaatttaaaatgttgcacccagtgatgatagagcaagaatatctattagtaaaggaagttataatctgaaacaaaagctttttataaaaataaattgatttataataaatgtaatggctaataatcctaataatcgcctaactccagaatgcatttctgtcagatgggctaactttgttggctttagtgtcttatttataaatccatcccttgggattgtcttatctagttgttgctttgcataacatcaatttctttgatgcttttccattcatgcaccctcttaatagttatctcctgaaattacattgggatctggaaatcccctttcaatctttcaaaaaataccctcaaatttatttctaactcataaaaattaatcttcccatttctgtgagaggatttatgaataagcagagatatttatttatgtgtaactaccagacattaaactttgctctggatttcaacagtttttattgtgtcttttgttttcacaataatcattgagccctttgctggccaaaagctctgatacccttaaggagaaatgttttcctgtggtttttaataaagagcagagaaaatcttggtttatgaagattgagaagtatattcaccctatttaaagttaattccaacttcctgcctaactccgtttcaaagggatttagcttcaaatcttaactttttttagaaaatataaatggagaatttagataaacagtaattgtaaaaatttttaaatcacaaattgagagaatttctataataatacatttattgatataatgttagcactccatttaatctgatgtaaaatagcagcaatagaaagcatggccacttggaaatcatttttgtgataatgcatatgcttcatgtatggaaatatctttctaaatggtaataggaaacatttgttgactgtttaccattatcaagtactattcttaatgtttcacatttggtcttaacaataatcctacatattagatattattacaaactctatttcagaggtagctgaaacccaaataagtccaagtaagtgacccattgtgtaactagaagtgatagagctgacatgtttaattccagacaatctgagaccagagcccttgcttttaaccaatatgtgaaatagcctcaaaataatactagaaaccttaaatcatgcatttagaatcatcaaatgcatcatcaaaagctagtggattgtttgaggaaaattttcaaaaattgaaggaaagctgaaagagattttatttttcccaacagagagactttaaaagataagaaagataatgctgttatttcttattaaaaggtatatgatcaattctcaccaataccaccaatatcaccaatagataatgaggactggaactctttatctctaaaagatgacctgaaacactatggaaaaggaagatgcattacaacacactatcaaagcatcattttcagatacactgagtccatcttctcatggacatgatgacataggtaccatcatactgcccatatcgtgctacctcctcaactaatttcctttctctttcagggaccctggcagtggctcctcctaggttgttcctaagccccacatcccctggcacagcttccttggaagagttgtccagcatctttgacacccagtgactacattgatcgtgcttctaaggcacccttgtagtcagtcatcgcattgctgggatgccataattagtgtgaggaaataattatcagaatcagacgatcaattctatatttaggctttcattccaagtagatctgatggctatagcgctgtttgctaagaaaatctcaaagaatttggaactgaaatagtgaattctttggggctcaggtggaatagaatttctctcctgactccaagtgcgtttgtcacaacaaaagtgcgggagaaggaaactactgtagaaaaggcacgcaacaccatcaaaggccaccagtggttgcaaaaagccgtctatgcaactgtgatctctggaaataccagctcaaggcttttttgtttgcctcaatctgacgtggcctcacctgcctcctttattttcagttgtgatctggattagatgacaattccagtgattggtttagacctatatagctagctggcattttctcaatgtatcaaggagtctgtatgtctctcttcctacacacctgctaggtctcaacttagctatctgctatagcttgtatattaaaagaatgcctgataggtctaggcctggcttactccttatctgctacctctaaggcccacacagaaactgcccatgtgttatgtagtcccctttccctctcaggtcttcaaacagctacaaagtatctcagccttcagcagttcagatttcttcttccagcaaatcttctagagcacagctcagagcagtagccctgcagagctatttactcttcagtgacaaggaccttctcttcctcttcactgtaatgatgcatccttatggttactctgtgggcctgcatatcacctaaaatctgaaactgctccacttctaaaatcttaatcctcaacataccaatgttggaatacatcttcttcttccacattcttattttcattacatccccttcttgcgcttaactagatgcttgtttctgttccccccacattcacagaataaattgccaatcctctttcagccttgcttcctactatgtgcctcttggctacatcttatgactttatactataatgacgctgccaccactaatcctgactgctttccctctgtgggtccgactaatctgtttttaaatcctctatggttgggtaaagccaactattccacctttttgttccaagacctaggctactcagaactggtttagaacatcagaaaatggtgacaattgacaacgccgcaaattcccaaactccagctctggactggcacttcaatactgcccagaaccccttctataagtgcgatcagctctctctgctttgccatctaataattttctgcttagtacaagaatagtttaaaaactcttggatttctaaaacaaggactatcacaaccaattcctactcagcctgtctaaatctataatcaactactttgcagtaaaactgatttttttctcctacattatccattataataaaaggcaacataatgtatttagtaacccttgtgaaacttctggtatagccttctccttttctccattcaaacagtcactaagcatatgaattgcacttctttattattcctcctctcagtctcctgccctgccagatttctggccaccattgcttctgacacggtcccaaggacactggctatcctcacactgctgtctgataaatattcctacaatgcaaaccaggctcaattataggactgtgcataattatgcatagtacaatcctcctgcccttttcctttacataagattaaatctagactatcatgcaaacctctcccatctccagccatttctcatcttgaacacctcaagtagcctgatttcctcaccactgccaaaggcaaagtgctactctgtgcacttctttctttgttgaaaacacaaccttaagttgttgctattatgcagatttttctctatgtccaaagtggacatgttaaagtcttctaaaattctccataagtcacacattatatgtgtacacttgccagagaatgtatatgggtatttcttgggataactgaatttagctattgctatgaagaaacatacttgatatcatctgcaaaagaatatattgcagttgtaagtaatgaataaaatatgtggtgaaatcagtgcaccaacctagtgttttgaatcatagtaaaatatttagcacttatcctgtgccaacaagagttcaaaatgttttatatatattaactactgttaatcagcttaacaattgtgtgatttctaccattttattttcacagatgaagaaacggctatatagagagataaagaagcttgctcaaggatacacagccagaaagcaaaagagttggagtttgaacttcgacagtctaactcgaggttctttctctgtgtttaatcagtcaaccacactgcctcttcagaagcacgcataatgtatgctctaaaaagtaatgtcaatgtattaggtgtcaaacagtaaatgaaatttctcagaatactgctctctaccatatcaatagtagatttaatacaaccaccaggcaaatcaagctaagaaactcagccctggagatcagaccaaactggtggccagccaagaaatagacaaaggaatgttcaggggcagagtttagggaggttggagtgtgtgttcacaggggcagagggagtaaggggtgatgtgcggtcaaggtttacaggttagggcatggatcatagaggtgataccagggaagggagtacaggaaataatcccatccaagtaagaaatcatcagatgcatggttccgtttttaagctgccaaaattaagaaggtgggcatgaatttgcacaggactgtggaaaacagaagtttctgggtctggcttgggattttacacagctgcattatgggggtatcactatatgatttctaagcaaagatctcttggtttgagaagctttcatggacagagagactgctcatatccccagaatggggcagggataaatgggagagagatggcagagaagttatcactaatgaagcgtcccaggtattctgttgtatgtctagaggtgaaaatagaaagctctgctccttaaaagctatgagaacttaagaaagttcatgaccatttgtaagctagggttattaagagggtctgttttatatggatcaattaagtaacaaacaccttttgaaatataagttgaacacagcttttttagaaatttgtaaactttattttgataagccaaaacacatataaatattcatattcctctcctcacatttttataagaattcaagctagaaaaaattaactatgttgataggcttagagaaaaattaggtgtcagtgtcccacagaattctctccgtctattagttacaatgaatcttaacagtttattttttaataagtggaatatgttaatcaattaactgagctaaagctattacctaatgaggtagaagggtaaattaactgaaatgtgactggcattcttcaatataagaaagacactattagcctgggaatcacgtggatattctgtggattcacagacacattagtccatgtgccttcagtacagctttacatgcagcttgttctaaaatctcaagttagcaagtttctgtattcctaaaaggtaataattagaaccagagtatctggggaagtcgccacacagcaataaatattgggtctctagagccaagtcttaacattttgttttcttaatagcttaaattatttatgaacatgtgtttgaacaattcttaaatccagtagctaaattgagttgcatataggcctagaagggtctaggctagggccgttctgtggaaaatctgttaagtcaggaagcagaaataattctgcttaatctttgattgtcaaccatagtgggggatggtaagaataatgggagactttatataaaggcagctgcttataattgaggcattgtcagctgaccacaaacatttgtttccactgagatattcctaatgagtgctactgttgaaggcaatgcattaatatttatgtgattattgttttatatctaagaagggatcaagagggtaatcaaatattcatgttaccaggcaagcaatgggctcactgcctgatgagcatagaaatcaataccatggcaccagcttttgagaaaataaaagctttattgcaagtgattggcaaggagacaagaggcaacacaaatatgtctcccagtgctgggggctggggcaaattttataggcagagggtaatgatatgattggatctggcaatgagaaatgctgtgaggcatgatcggactggattgtgccatgaaatgatgccagggcttgatctgattggatcgtatatcaagacatgaggtgtccacttattaattcagtcccccatttcttggtctgagcacttaggttccacccatgcttgcaggcttagataatctggacatgctcaggttgcataacttgcaacctagggaatccatggcaactgaaaactcaccattttattacacaaagttgagtcagattaggctggttctgtggttacaataatctaccacagagttttttaagatttaacttcaaatatcctgcatcagaaccatctggaaaacttgagaatcatcgcagaatgtacaaaatgtttgctagtgtagcccggtaatattcatgttttattctttctgggcctctgccaatgctttctgagaatattcctgagaatcatccactttgtagctactcataaatatgatgtttggtgacagatcgccttcacttccccagtacttccaacacttgtgagtgcctttacttcactgtattatatctcttcctactcaaaatacacagaatgccttctgctttccagactgaatccaaactgatatgctcaggtgatagagaaaagacactgaaattaaaaatgtgacttccgttttactattgctaataatgaagcgtccttttactcttttatagtaggtgatctcccaccagagtgtaccaacaagtggatcggtcaagataaatcattacagtgtgtcgagaaactattagaacacctatttaaaggcagtcttaatttttcttaagttctaaaagcataaatgaatgtcaatatttatatgtgtaagctgttaaaaattacaacaaatactctaatgcttatcaacaaccctggtaactaaaacatcagcaatatttctgagtttctcttcaaattcatcttctcttttctgctgtttgtctctttcccaaagtatacattggtaataaaactgaaattttggtcttcatttctttactccatttgcaacttgcttttatattaactaacacaaggattttcagatttaatttatgtaacttctctagtagctacagttcacccttttttactacagaaaagttttgtattatgagaatgtaacacaatatgttaatttatttttctccctgtaattattatgattcttttttcggtacttttgttcgttcgtttgtctcatttgttttgccagtatacacagtgccactgttataagcattcaatatttgttatgtaactactggcaaacataggtcaatgtttccatatatattctctcaggagatttctgtcttgttgggtcttcacattctcagcttcattagataatgccaaattgcttttcaaaatattcccactagtgtagagtctatcgggtttgtatgagttcccgttattctacatccttgccaaagcttcatgttttgggacttgttaatttttgccaatctggtgggtgtaaaatggtatctcattgtggctttaattggaatttccctgattacaaaagcggttaaactccttttacagaattaagagctattcatcaaaatgcccgtttgtgcatattgccaattagtatgctgagttatttatctttttcttactaatttgtgggaggttttcatatgttctggagagtaatcctttgttcattacacatttgttgaaccagtctgcattgtttctctttgcattttttgtatttattgctacacagaaattattaacttttttctcatttattttttgaccctttaaaaattaaccctttgggccgggcgcggtggctcacgcctgtaatcccagcactttgggaggctgaggcgggcagatcacgaggtcaggagatcgagaccatcctggctaacacggtgaaaccccgtctctactaaaaatacaaaaagttagctgggcatggtggcgggtgcctgtagtcccagctactcgggaggctgaggcaggagaatggcgtgaacccgggaggcggagcttgcagtgagccgagattgcgctaccgcactccagcctgggcgacaaatgagactttgtctcaaaaaaaaaaataaaataaaataaaattaacccttttaatagaacaaaggcataaaattttctcctgatttcacttaaaaatgtttcataactttgcatttttttgtatagatcttgaattcacattacaaatgtcaaaattggcagggaatgtaaaatgaacaggaaaactcttaaagtacctaaaatagtaaataaatggtgataataaatatgaatcccgtgtttaaacttttcatgttattttttgttttgagattattaagagaataaattcaaaatgaaattacaagtaattttactttgaggtaaaaaatttactaatatggtaattttattggaatatagaatacttgtaggtcactggcatattcgaaaatatacattgtgaattgtgcggtaatcgaacctagtccttctttgaaactgagtgaatgtgctatagctttagtaggaaaactgatgagacctggtaaaaaggcacagctttttatatctgttgtattctaactcttaggaaatgtttttaaagcattcagacagaggcaacagaaaaatctaggtttatttattctgtttgtttttcatgtaagaatatttgatcttcttacccgcttaatttcacctggtttgttcaattactagtatataaacttgtaccgaactttcagaaatgtaatttatacaacattcttgtgaaaatgtttactctttatcttaaaaaattaaaaatcgaaagtttgactgcatttgtgtccaaatttcttgagattcaaaacatttttattagtgttctaatatgcatacacaggtaagttctaaattaaggcagtttagagtctttttcctcatataaacattctataaaataaaatgatggtaaaccattatttcactttttatgaacaaaatgaaagagaaaatttcagatctctctacactccattctggacttcaatgtgcacagaaagacatcaagagttaacttaagaggaagaataaaataaatatctaacgccctttaaagtgttatatttttacggcaagtatctggatttgtttttataaagtcttttaaaattacttttgtgcaagctaccataaaatataatattgatattttggaaaatatcggggtttaattctaaactttattaagttaatatttatctgaataaatttggaaagtaatctaacttctttcagccacaattagttttctcagctcctatagatcacacagttatgtgaaaagcaaatgaaaaagtactttgtaagccttaatatttttatattcctgtaatatatgatgtggaaatgagacaaaacaatgttatcatttagaagtcccagaggaaacttctagtgagtccattaaatttatgttaaatctattttgaagctaaatattatttatttttttgaactacatatcttaaaattagaagtttcccaagagaggttatagatgaaattatggatttaacactagttagttaagaatgtaatcttgttttaatactgcaggctttcagccaggattatacctcatacattgctcgaatattttcctcaaataattgaatactttggaatggaattttacattcactctatatgccagccctcaagcctcaactaagctcaacttgaaaaacaatgctgtacacatcacccaagcaaaaactttctcacattaattaagagattctgattggatcccagcaatcaactcatatggcgccatatcatccacattatttgtagagtaggccatgatatttattactgttggcctggcagctgtgtctttgaaattttgaggtggttacaaatggaaatgggccacataccccaaacttaccttctttcattacttcattttttctggcacttgtagttgcatttatggaatttatatatttcataatactgtatccttaagcaaggattagcagcagcatcaacaataaatatgactgaaaagaaacccaggattttctccagaacaatagaatgttcattggtggtggttatatccaattcaaatgatagatttgttagcctcttcttttgcttagatttgtttggctcaaaaatagattcaaagataaacaaattaggtagatcagtatgttcaggaatagtgattgcctaaataacaactaaaagttgtatactaattttgattatttcatatcaatattaattactttaagattcataagaaagcaaagaaaatataaatatacatgttaatgatcagtctttttgtcatttgataaaggaattaattttattttgatgtggttaaggataatgtcagccaaaactaaatctatagattttatcacattgaaaaaaatttagatgtaaatatgaaaagaaaataatatgaagatagaagtattgcccttcagagcttgaaggaaagacttcctaccatgaagtctgtttatactaaaataacttctgcctttttatctgtttctctatgtatttattagaatctcacccacataaaacatgtctactgaaagagattgtttgcaaattagtgcccaaaatgtacttccttgtacatatgcttttggataatcgcccaatcctgcactgactttttcattgccatgtgacattctcttttgaatgggacaataataaatgaaaagtgcttgcatgcagggcctaacttcttttgctactgagaacgtgtcccaaaccatgtgaacaagcccaggcaagactcttggagggtgagaggacactcagagagggggcccacctgtccccccatttcctcttagccattccaccagttggatataaagattagttacatgagcgcagactgggaccattacccagctgaactacagaatcaaagacaaatatgtgatgattgtttttgccactaagcattggagtattttttaatatgacaaaatgcatttatcatcattatattttcaataaaacagaaaatacaaaagaaagcaatttgtggtgagcttattaatctgatctttattcttaccttaatatgtatttccaagaactgagttttgacaaattctcacatttgcacatttatacactaatggaacatgcagtcttacatacaacttttttatagaatgacttgaacactacaactagctaaattaaatttttaaaaatggttcatgtataattctgaattaaaattttaaaattaatttttaaaagccatcttaatacattttatgtactgaaattatgtttatgttactatgaaatggaatctttgtttagagcttttatctttggataatctgttgtttgtatcactctacccaagacagaatttgcatgtgattttgaatgccctatagggatgcaagatttttctagacttctttgtcagacttgcaatgggggtgcctcatttacttggcccaccttgctcaaccacttgcgggagggagcacatgagtgagccactatgggatccaggggactgctttgggcattggcagaagcaagctccatgggagccctgaggcagcacccaggtgggggtgcctgtgacacctgaagccccagacatgttacaatgctctcttagctccactgtccatggacagtggtgtgttatcagctcagtgggccccttgcttcatcacatggggaggctgccctccaccagtgagggaaaagggccagtgtgaaaacctttggggggtacctgccttgggtgggtcccaagctcttgtccagagtccaagaagaatgaggtcacacagacacttgaaggatagtggaagtggagaattttatttagcaatggaaatgtctctcagcagagatgggagctggacaggggatgggatgagcaggtaatctttccctgaagtcaagctgtctctcttccaaaatccagccatccctctaaagtcaagttgcctctctacagtcaagccacttttctctcttctactgactgagtctggggtctttataggcacaggatgtggggcagggtgagccataggtagttttggaaaaggcaatattctattggtaaaagtacattattcagaaagaagcaatcaggagagagtgggaaaacagggatagaagttctaactttgggcagcaggtttcaggcttttcagcttaaaggtggggtttcactggggaccctcccctgtctgccaagaatttccatgcctcctgcctctatcaacaggaaaacatattcatgaagtgcaagagctgttgccaagtctcatgaatattctcaaatatattctcctgaaggaaaaaaatgactcaaggggaaacaatatgaaacagactttatagaaattaatatacactccaagccaacagaaggattacagatcatgccttcagccacagaaagtacaagaagaagcatctgagggaacagtgggcagagtaaatgctgtggagttacaaaagaaatgtctataagtcaaccctgcaggtaataaaataggttctgcatagtggtatttgtttgtccttaagctccactcacctatgtgtttaaaatttgtatatctgttttatatcaatttattttattcaagtccatatcaacatggattctaaaaactggcttcacagctatttctgctaacttcctgaaaagcctgatttttgtctagaaaacaaatagaataaactcaagtttctctcctctggtcttctcgtatcaatggcatagcactatgttcaatgttgtcatagggaccacctcttacactctcacagtgacctctgttgcaaaagggaaccattattgtcctgaatccctaaaaacacaccagggacagggctgtgctttctaagaagatttgacaaaaccaagaaaaaaaaagaaattaaaagaaaaagtagcttatcactattattatgtactcttaaaatccagagttctagggtgtacctcatcatccctgattagaacctggtagttttctatgtagtagtggccaactcagcctgaccaacaggaatgcattcctgaaactccctgctcttctttaatgataaaagattttattacttgtccaagttcaagtcccatcccattttcttctcaagatatacataattcatgattaataataaaacaatttccttggagaatctctcccaacagaaaattggctgtatccaaggcacagtaaacaaacatagtagttgaaagtacattatgccaagtttgtgtttattatcttaatgacactataggtatctcaccctcagttggcctagatttttgataaccagaatggggcatctcctttacatgatatttctcctaaagttaaataaaagtaaaattagacataaaagtccttgttgctaagatctggttttcttctactgtctactttgagtaaatgcagagactaagacaaacaaacaaataggactaaaaatatattgctaaaaatccatttttgatctttatagtactttaaatctctatttgggaactctttttttcagacaattttttaaaaacaattatattatttttaaaaaatggtttaaagttgatcaagttatggtttatgttcaataatagtttataatcaagttatttcactcaacttttattggtgaacagaatacttaacattgtcttataaagcctctatgtgggttcctattttagtatgttctaccttatatgtggatgatattaagcaactcttctctcaaaataaaggtatacactcctctaaagacaaacgttgataccctgaaagcagaaacaaatttacctctgtcctaatggtggttttctggccacaaatcctactacaagttacccatagtaacttctagcaattcatagcaatatccgagttgccaatagattatcagaaggcacagtactgtgagtcattcttctggaatgctaagacagaaatgtgaaaaataaatttactaaaaatgagctgagatattgaaacccttcaggagaaacagacaatggacctgagatatcaggagctcttttgaagatggcctaccaaagttatcaaaaatcaacttaacttcaggaaagccatgcaaaaaggagagttgggccttaaaatgcccatgttaagtagctgttggatgagataagtgaatatgaaataattcaatgcttactacctagaggcttcagtcctgccctatagtgatatgacctttgagggaattcactgtgttaaattgtcatgcttactgatgagctcaaaactgcctaataatcttctgagtagattgataccaagtgtacttcatgatagtattttgactctggatacctagttgaacttaagaaggcctttggtgatcactgcaggcgtcctctgattacagatggtatgtaaaggaatagggctagataaaaattttaaggagggccaaaagacaagagaaggggacacaggactgtattttgaggcactttagaagttagaggtcaaggagagaaggaggaatcaggaggaaactgaaaaagaaacacctattgatgtggaaatataatcaaaagaatgtggtatactgaaaaccaaaggaaagttgtattttaaaaagacaggagaaatcgcctgtgtcaaatgtcacctaatacaataaaatagaatattgcaagaaagagcgtggtgtaagggggtagttatttttggctgatctctgttctgattggctaacacccatgccacaccctaaaaggcaacgttagtccaacttttctggaatttgggcgagaagtgcacagggaagttagagttggttttaagcctactctaccttgtcccaaagatgtcatgttgtcaacatcttcagtggcaagagtacgtggagacagtggaagaatgactaggaagggaaagaaaaaagaaatagggcaagggatagtttagcttgtacatacatcaatatttcattcctttataagaaattacctaaggaaatgaaatagaagtttttctctatttttgcctttcctaaatactaagaattaaattccttgttaaaactaaactatatcaaaagagaaatacatagagaataataagtatttgaggagctcattgatattgacacctattaatcatcctaaatatctaaggacaatacacaattgtgtttttatgactgattaaatttcaaggtgattacttcagaatagattgtgtgttgttgtattttttaaaaattatatgctacatttggtgcacagtcatttcccattcttcatatggcacatggcgctttctttaatgacacatgtgggctgggaaatgtctcaatgaatggaaggtgcaattccagtcatttaatacaccctgctgccagtcagtgcatgttgctttttgccattcacttaaaaattcccttttgttttatcaacaacttcacctccgctaaaaacaggttgtcaagaatgactacacctggcattttattcataaggaaatttcacattacatcatagtatttggaaagagaatgtggaaagttgatattctctctaatccttgtgctttacttcacttttttacgtgaaaagtactgttaacaagtattttcatgattggcatcagcagtcaggctgtaagaagttaagcatccagcacatctcaactgtgtagccattgatccaaatgctctcctttccccctgaaaaaagtaggggtcacaatctggttatgtggcagttatcttcatgaccaagccaattcatggtgacagactattctattccattaatttctaacccaacatgaggctgtaggtggtggaaatcaggttacatttttagatatacaataaaacccattttttagagctaacttactcataattagtattatctagataagagctaggatgagaatttatctctacaaaaaaaattttttttaattagcggggcacggtggtgcacacttgtagtctgagctactctgagggttgaggcaagagaatcctttgagcccagagggttgagaatctagtgagccatgattgatcatacccctgcactctagcctgggcaacacagtgagaccctgtcttaaaaagaaaaacagactacccaattaatagcgcaaacaaaatttcaggggtaagatatctgtatttattctatccatatataatagaaaatccatttgctcaagtaaaaattttagttgtgatcaaattcaagatgcttaagtcttccagaaaatatcaactgtaatgtgatcttaaggatgaaatgtatttatttatttacttatttaatttttgagacagagtctcactctgtcacccagactggagtgcaatggcacaatctcggctcactgcaacttctacctcccgggctaaagcgattctcatgtctcagcctcccgagtagctgggattacaggcatactccaccagtgcctggctctaattttttatttttagtaaagacagggtttcactatgctggccaggctggtgtcgaacttctgacctcaaatgatctgcccccctcggcctcccaaagtgctaggattacagacatgagccactgcgcctggccaagaataaaatttaaagagcaaatcaaaaccaaacagtgtgattatgcaggttatcatgagtaatatttggggcacactttctaggaagaaatcagtagcgaaatagattcttagtaattgaatctaattactcagataaatttatcacacacttgtaaatcactgagaagcaataggaattggctgaagactctagacttggaattaggaagcttggcttcagacctgaagattttctggattattttttgaccttgataaagtactcataacatctcaagcctttttgtaaagagaggagtagttttcatgatcattaacctttttggattgtgaaaatttcttagtctaggatgaaagctaatgacccatttacccagaaaaacacaagaaagtacaaacccaaggtttaaggatactcaaggcaaccaaaaacaacactgccagttagtttttctgtgcatatacatttatttgtgtatgttctacaaaatatattttatatgtatagttttgtacctttctatatgttccatttacagttctgtaactttttttctttcataatgaatgggtattgaaatttgttaatttacatttctgcctcaaatgagaggctcatataatttttctttgttagcttgttgataaggtagatcatattgatcgattttcaaaagttgaactagccttccacacctgaaataaatcatatttgattttgatgcaaaattatttttatacatttgttggatttagtctgatagtatattattgagaattttgacctctacattcatgaaaagtattgatcagtatttttctttgcttacaattatctatttgttttttggtattaggttaattgtggtttcatagaataaataggaaatgttattcctcctattttctggaagattgtagaaaattggtatgattgcattgttacatgtttgatagaattaaccagtgaaccaacaggcctggtgctttcttttttcaaaggttattaattatatatttaaccctttttatatttataggacaatttagagtatttatttctctttcttatagtttttgtccttcaaggaataggtccattccatcaaagttatgaaattggtgggtgaacacctatcagtagtattgctttatttttgtattactttccatggatcagtagtgatgaccatgccctcatttctgatattggtaagttgtatctttctttttttcttggttagcctggctagatatttacaaattttcttgatcttttccatgaatcagattttgtttcattaattttctctattgttatcctgtttcaattatatatttttcttctgtaattcttattatatcgtgtattttcttgcatcagggttagtcttttcctctttttacagtttttaaaagtttaaacataggttatttattttagatctttcttttttagcatatttatttcatgctagaaattttccaataaccatcacttatttttcattatattttataaattttgatgttatatttttagtttcatttagttttaactattttttatttcttttgagatcttttcttggctcaagatttatttagcagttctattttttaacatcaaaatatttgagaattttcaggtctgtgattgcttccttgctgaattccatgtaatctgaaaacatactttgtataatttcttatattttaaatttcagaaggtgtgttttattaccctacatattgtctatcttggtaaatgttccatgtgaaatggaaaagaatgtttattttaatgttgggtagaatagtctttaaatgtcaatcgggtcagcttactgatagcgttactcaggtcaactatatttttacttgtgttttgcctacttgatcctattaattataacacgtcatgttgaattcttcatgtgcaataattgttttgccttttttacctttcaattctatccgcattgtttcgtgtatgttgacactctttttagaggtatacgtatttaagattgttgtctttttgaaaaatggacatttttgcaattatgtaatgtctctccttattgctgatagtttttcctgttctgaagtcagctgtccgatatgcagctatctactgcagctttctactgattatttttaacacaggatatctttgtttatactttactcttaatctggttgaatgtttatttttaaaatggggtttctcattaacaacatatagttcattgggtcttgagttgttattttaatccactctcacaatctctgttgtttaattggcgcatttattcatatttaaggtgcttattgatatagaaggattaacagataacatgtctgtatgctaatatgtttatatttttttctattccattgtatttgttctatgtttctcttttccttgtttatctgccttctctacttttaattgaatattttctataattcaattcttctgatttttttattcttagtatatcaattatatttcattgtttaataattgtgtgcttttcaagaacctatgatatttatttttaacattacacataactacacttcatggaaatgtaacctttatgacatttctgtcatttattgaattttacttggcatagtcacacaaaacattgttactattattgcttaaaatacctgtcttttagatcaattaaaattaagaaaaaatacggtttttgggaggccgaggcgggcgggtcacgagatcaggagatcgagaccacggtgaaaccctgtctctactaaaaatacaagaaaaattagccatgctcggtggcggctgcctgtagtcccagttactcggggggctgaggcaggagaatgacgtgaacccgggaggcggagcttgcagtgagccgagatcacgccactgcactccagcctgggcgacagagcaagactctgtctcaaaaaaaaaaaaaatacggtttttattctactttcatttacccttccaacacctttttttatgtagatctaagtttctgacataaattaattttttttctgcctgaagaacttcaaatgtttcctgaggacaggtctgctgaaaaagatttcctccatttttatttccctagaatagtctttacttattctcgcttttggaaaataattttggtagatatatttttctgtgtttggttctttgcatggtttatgacaaaaaatgtgctgtaatttttatccttatttcttcatatgtaagttggatttctctgcacctcttctctctgtgtttctttcaagagtttcttattttcttctttgaataagaaatgtgtaggaataatttttgtggttattaatcttgcttaatattcttaaagcttccaagaactattttttgtgtctattattaattttggaaagttgtcaggcattaatacttcaaataattattctggtattccctggtattccagttgtgtatatatgtcttttgatattagtgtactctttggagctcttatttttctgttttaattcattcttttccatttcctatttcctgtttcccttttagtttgggaagtttttttgttgttgttgttgttttttcttttgtttttttgaacctaccatcaagtttgatctatcatgaattgaaactattttttattccctgcttttatttttttattactcttttgagtttttctccctctctctctctctctctgcttatattatgcatttgtgcttgttggttgtctattttttccattagagtcttaagaaaattatgatagtaacttaaaaatccctgcctggaaactgataatgccaatatctgaatctgggtctagtgattcttttgtctattttccctgtttattgtggtttttaaaaaatatttgtttggttttgcctttcagtatgccttgtgtttttttcttgttgtggttgtggctgttatgaggttgaaagtcatacatgctgtattggataatactaaatgaggtaactaggcctttattgtgagagtcatgttaatctggctagaagttagtttgtgtttattatttgttatatgtattagttccaatgacttcaaattcccccttttgaccttgggcttctctatatatctctctcagagagattctgtattttttagttctttaaataaacaggatttttaatagatttaataatttagattaatattttaaatttaataaatagattctttaaataaatagattaaataaatagattctttaaataaatagattaaataaatagatttttaaagcttcctgtagtcatccttttctttcaaggtttttggtcaacctttttattcccatctggtattattccccaggcatctatattgttaaacaattgctgctaattgttttcagcaatcacccagggacagggattttcttattggatgaactccattgaatgagctttttttccccctatttctactgaatgagttcttttaatattgaatgagctcttgtcatcactaagtgaaataatcacaaaccctgtgaatggaactcttcggggagttgccaggtaaaatagtgacaattacctgatgatggggctttttgacaaactccattcctactatacctaccctcatagctgttaagttgcagttcttcacaactaccatgatttaaaagctgttggtttttaagacaacaacaaagctggtgagtggagaatggaaataaagcatgttaaaaaacaaacaaacaaacaaacaaaattgttcttaccaaattttaaccattttgcttgaatgaatattcctcagctagtataagcctctagttaagtgttctaaaacagttgattttggccattttggccaatgttccctcactgtttgtgtagacgattatatttttggagtttctaactccacaattcgaaaagtttcactctgtattgttctataagtcagttctcacattgctataaaggaatgcctcagactgagtaatttataaagaaataaggttcaattgactcatgggttcacaggctgtacaggaagcaaggctggggaggcctcgggaagcctccctgagaacctagtcatgacagaaggtgaagggtaagcagtcctgtcttacatgaccagagcaagaagaagagagacagggggtggtgccacacacttttaaacaatcaaatctcataagcactcattcactatcatgagagcagcagtaggcggatatccactcccatgattcagtcacctctcacttgattacacctccaacattggggattataatttgacatgagattttacacagcatcctaaacagccatctaaataatgagatacatatatgtatatacatatatctcatcattttgagctgcaaacttttactggaggcaatagaaatactaaatgtgaataaaatatgtgtaatgctcaaaggactttgcttcaaaacatcatgttgtaaacatcacgttatttatgtaattatgtataagaattttggaatacaaacaatattatttttatagcagtaagtacaatagtttgtggcacttttctgttgctttagcttttcataatttctttttgcgatcgtttacaatgcccattccctaagacacccttgaaaaacgtatctatacactgagcaaatattccagaaaatataaacacatcaagttgtcacagggtgaagctcaaaattggggctcagcctggaagatcacgtgggtttttggcacaggaaggaattcaagagggagccaacaataaagtgaaatcaagtttattatgaaagtaaagcaataaaacgttggctgttccatagatcaagcagccccaaaggctgctagttgtctattttatggttatttcttcattatacactaaacaaggagtggattattcattggttttccaggaaaggggctagtggccagaacagagggttcctcctcctttcagaccatatggaataacttttgaacacttccaaggcatttgtaaacagtcatggtactggtggaagtgccttttagcgtgctattacattataattagcgtataacaagcaggtaggacaatcagtggtcacttttcttgtcatctttgttttggtgggttttggctggcttctttaaagcatcctgtttatctgtgggatctttgtgacctgtagcttgcaagaacagccctgcccagaactcctaactcaaagttatgaaaatggcaaaatgtcctttaatgagtgtatgtaattactaaagcaatgctattaagtaccaagtgactgcttttcagcaaatgaccttcacaatatgtacattgaagaaatattcaagttttagcactttaatacttgcaatatgtgcttacttttaattaaagaagaaataagtcattgatgtcagatagctgatacaaagcctgtgatacaatctcaaacactgtgttagatgatgtgtgaaacacacaacgatgcatttttcatctgaaagatgaatcctagccttgtactagtgattcacaaaaattcaagcccccttaaccatttggtgtcttcccagacacaggacttagaatcctaactgtagtacatatcaaatctgttagaaagtagataaattcaacacacagagaatataacatttaatgaaattaacaagtgaggaaatacttatttaaagggtatgctaatgccattacttcatattttaggttttcatggaaatttccaaagaaattcatcctgatagatttactagacagcttatcatactatgtaatcatagactcctgagaattatcttattttccaaaacattgtttgatcatatatccttaatttctagaatcacaagtggagggaggtgtaagggcagatgttcccttgaaaagcaaattgaaaaagaaaagagtaattgcaaaaggattccttggcatttgtcttgagaattttctttagaataacactcatcttcaagtcaatgcatggaatttccttccagtgtagggaaaaatttgaaaaaatgagagggaccgttgtaattttcactataactgggtggtagtatgtgggtgttaattaattatttgtttttacacctagtgagtcacctcttattaaggaataaagagttcataaaactttctcatcagtgctaatttgttaccaataaataacttaatgaagtggataaatattatttaaattttgttatatcccacctacaaaggtagtaagactaaaaacgtgatgcttctcctttatttctagccattgtaattttttcaaaatttttcaacaaataattatgttttaatttcctattgcttttaaaaatcaatccaaaaagattagactggctcaattatatgaataccaccttcattccagcaacttgtagggttagcaataagactcactacaggtgtaatctatgacctagtaatttaatatacattttggacaatcacgcagaggtgtcacttacctttacgagcacattaattgggcatatagaaaaagctgtaaaataaacagcttttcattgtttttacttgccagttttttttcagaattttccagtatataatttctgattgagtaattacatttttctttcatgtccatgtcaccaggggctccagtgaatccatgctggagcttcagtttgctctcctgggcgttgtctttaggcataaagtaacctgagtagattaccgaggcagaaaatggtcctgatgttggctttctctctgcctcttgtctgtacaaataatttctcttctgtctaagcagtttagcacacatgtagctctctattctattgctccactaaagttgcagcactttgcatgtgagtgtgtatgatgatgctggggaaaatgaggagaggcatgctattctgaaataacgtttcaatagaaataaggtatcctaatgagaaaggaaggattcataaatccttcatgactttaaaagcttattgcttttaaaaatcaatccaaaaggattagactggctcaattacatgaataccaccctcattccagaaacttgtaaatgtagcagtaagacctactgcagaagtaatgctgataaagaaagtatcctaatgggaaaggaaggattcatatggctaccttgtgaacaggtgcctactttgatttccttcaaagtgcaaaaatcaggaactcaccgtttagaagtctggcttcaaactattccccttttagataagtaaaagtcacaaaatcataaaaatatgacaatagaccacagttatgtaattttcatatacatattcatccctcaaagagaccgtaattaaccttttagctcttctttctctgaccatagagagataacaatgttttattttatcattgtctaccagcagtttaatatttccattgtcccataggtctgttaccatccaaccatccccatcacttgttcctttataccgctacagctgagaccgctgctagcctttctcgcctggagcaataactaacatttggtggccttccaatgctcttccctggcccactatttgtcagccagttttccttactaggagaactgggcagaccttattggagatagtgagaacagcagagagaaaacctttcgaataaaattagacaattgattctgcttctttaagtcttttggagtactttgcttttttctttcttctacagatgcctaagggagaaaaaaaaagggaaagcccgaaagaaatctctggttaactggagaatccaggaaatatgtgtcatttcgaaactcaatttcacatcagaccaagggttggtagtgacacatcctgctaataaaaccatccagacaagtcctcacaagctagtagtgtgttttttgatttctgcggtgacctcacttagaggagatgccgttggtttggtggatattactgaaaatgaacaggggacacttatgtacccgaagaagtgaaaacaaaaacattctgatgaaactgttttgaattttttgtgcctaaattttcaactaatttttttctaccatgatcaacttgaggaatcctgttcctttgatatcagttagtgttacgaaggcatcgaattcactggagtacaggaaagggttattgtcattgtttgtaggtgttgggggatgggtatgctgctgggggacatgagagttcagagatattgcaaaaaacagaaattatatttaataacacaaaaggtattagtctctaaaataaaaataaagacatagactatacttttataattatattaattcatattttataaactaacttggtagttctattttttaactgagttaatgacattttaaaacacttttttgtgaaaaaaataattttgtttgaattatcagcagtttctagatgtgaggatttgattttaatttacttatcaatatttatgaagttagaaatattgaaagaaaagtgtgaaaataattagactaacaaaagcttaaacatcaaacaaaagttaaaaaatgaagttatttctgacaactacgtgattaacatacaactgctgaattatgtaaattatattgcaaatattttaatttatttaataattctcatgacatgctgattgcctacatatttgtgttcatataacaaccacatttattcactactttttaaaagcatattatataatgtttttataattttaatagaaggagtgttaaaataacacttcaatcacatcttcctcttatacagataaaatggcacttttttaaataaaaatgcgtcattaaatcattttttccacccaaagaacacaaatagcaaatatctcaattataaagaaaaaaagtcttctgagatctttcccgatttagaagtctactattctgaattggctaaaataaaagcaatgactttacatagttgaacccactcccccccttaaaactgaaatgtgttaagagagtggtgaataaaaataactgagctgacagattacatcatctaatttacacccacacaaccactagctcctttatttcaaataaagctcctttgagtcttgatggtagagtcacataatctcaggtctgcacggcattcccatttacggtgtttctccaccagggaaaattggtgaaactcaaagttcccaggatgatgctgggaagaacttagagataaaacatgcactgcctaagaggagtggaatgtgaatggagatgaggctgtagacctaggcagggatccgacctaaggaccccggtgtcaggcaaagattctatcctgcagaaactgagaatcatcagagaattttacccagaagagaaacacaataacatgtgccctttataaacctcattccaagcaagagtgacacacattaatacctctaacagactatttatttaaagaaatttttaagaaaaataaaataactttaaaaccagaaaatttttatgaagctctcgtccgtccttccttccttccttccttcctccctccctcccttccttcctctctctttcctttccttttctttctttctcttttccttccttccttccttcttgctttcttgctttcttgtctttctctccttccttccttccttcctccctccctcccttcctctctccctccctcccttcctctctcttttttttctttctttctttctcttttccttccttctttccttcttgctttcttgtctttctttcttgcctgccttcctctctccctctttctttctttcttttctttctttccctttctttttcctttcttctctttctctccttctcctctccttctctcgctcttcctttcctgttctttctttctttgctttctctctctttctcttcttccccaaagttacaattgtgattgtagacaccttaaaatttccaactgaaaatcttgtattttttttagctacttagttttgaaagccataaagcatttttctttctaatcaatttattgaatatatattaacacattgaaaatatatctttggcctattattgcttaaccatatagaaatactttataattcatgtgtggtgtgtaattttgtttttgtttatgtgtggttttgccagtgttcccaaatcccccagccaatgtgcttacctgtgagttcaagaagaatttttttagtgtacaattttttgcttatcatcctaatgcaaatagttaaaaagtggagaaactgtgttgaaataggtatatattattttaaatatatatgaagtttgatgaaatgaacattaattttacattaaaaaattttattaattaactcatttattctattaatatttctgaagagcctatactccggtagttccagaaattttgttacttaagtgaacaaaacaagattcatgcccttctggagattacattaaagcagaaagttacatttaagacagttataaatgagtatattttgccttgctgaagggaaaatattgtaaagcaaggcagaggagaggagagaaaagaaatcagagaaggttaaggagaattgaggagattgtagagaagtgaggaacacaacttcttattgatttttaattttaattttaatgaatttattttttatttccaacttttattttaagtttggggtacatgtgcaggtgtgttacataggtggacatgtgccatggctttgccgtgcagattatcccatcacctagatgttaagcccagcatccattaactatttttcctgatactcttcttccactcaccctgaccctctgataggcccagtgtgtgttgttgactcttacatgtccatgtgttctcatcattcagctgtcacttataagtgagaacatgcagtatttggttttctgtttctgcattagtttgctgaggataatggtttccagctccatccatgttcctgcaaaggacataatctcattctttcttatggctgcatagtattccatggtgtatatgtgcaacattttctttatctagtctatcattgatgggcagttaggttgattccatgcctttgctattgaagattataactttaaatagagccatcagagtaagtttcactaagaaatgtaaatctggacaaaagcatgaagaagatgaaggagttaggcagggagacatctagaagtatattcctggcagagtgaccatggtgttccttgcacgttccaggaatagcatgaggacatcaacatggttattcgttgtatccagtcatattcagctgtacttagacatcttatagtaaataagagctgagttaaatgaatgttgtgactttgcaagtaagttcgataatgggagagaagaacaaggataacacaaagaatttattataacaattgtccatggagtttaggctggaagcaaagagaaaaaagggatactgaggcaataagtgaaggtgaaaagattgtagaatcaatagatcacagataatagtagggttgaaaaactcttaaagttgagtcatgagagggaatgtctgaaaaatacagaagagagccagatacataaaactaggataatgatgaagttgtagttattggtatcttggtgccaaggcctggggcagcaccgtccaatagaaatataatgtcagacacacatgtattcaaactgttttagtatctatctttaaaaaaaaataaaaagaaacactaaattttgtttattaacatattttacttaattcaggatagataaaatattactactacaatttgcaatcagaataaacttaataaggtatttcctattattattattatcattatgattattcattattattttggaagccagtgtgtattttatacttacagcacgtctcagttctgattgccacatttaaagtgaacaataggcaaatgtagctaaaaatggctaatatactgaacagtgaggtctggatatgatcatgaaaatggatggttgagcttgttgttgttactgcaagaaaaaaacaaacagaatttgaaggcaaacttgttgaaatgatcatttttgtagctactcagatcactaataattaagagtgatggagagagacaagccacaaactaaatcactgagaaacccaaaagaacaaccttgatggatgacaatgacggaagaggtactgaactcatgtcatctggtgacataagagtcaaggttgagagtctttagggaacaaaaagggagaggtctggacatagaattgaggagcagagaacacctacatcaactccagaccgactaggtctgtggaagaggaagaagccacaagttgagggctgtagggaaaatgctaaggtgggaacaggcttcctgcacctcaaaaggtaaagagattattagcaggagaggagtgagggaagagaagggaacaggacacatgcagagcgttataatgcttacagtgtgaaggtaaagggtggcttgggaattgggaggcctaaggaaaacacaagattgagtcttgaaaacagtaccggagggttttggtgaaaccctcagtgtggggttgggcataggaaggcatggccaactcacacttctttttcttaaacagctttaccaaggtataatttatatatggtacaattcatccatttaaagtgtacaattcaatgggtttttgtatattcacaaaattgtgcaaccattaccacaacctaatttttgaacattttaatcacccaaaaaagaaaccctcaacctatttacagtcacttcccattgcccttccccatctccccatttccaaccctaatctatcttttgttcctatagatttgccctttctgcacacatcttattaaatggaatcacacagcattagtaatttgtattggtttcattcacttagcatgttttcaaggtttgtagcatgtatcagaagttcattttctaattaccaaataataatcagttttatggatgtaatatactttcattttccattgataggtcaaagttgtttcctgaatagccctttgcactattatgaaccatggtgaaatggacatttgtgcacagattttcttgtggatttaagtttttaattttgtgtgtgagggggcatatatctaggactggaattgctgggtcatgtggtaactctgtgttaaacattctgcagaactgccaatctgcactccaatgtgaccactcattttacattcccaccagcaatgtatgaaggtccagcactcactcctccctgacccctgctaatgaaggcaaaaatgcccagaaagccatgtcttaactcatattgtggctcccctcatgatcactgaaattgacaacctaggcatgatcttcaccgcaatgcctgagtttacttttgatccttacagggaggaagagggctgatatcaagtgcaagagctcatcttgtctcctatgaatgaggatgagacttcagagcagcccattgtaacacagcagatgcctaccctactttcaaagcccattaatgcgggccaggcaacacaggtttgtaataaataaacacttcaaatatttacagtaactttgcaaagatagatatgtctaatcctgctttatagaaaaggaatatggggtttaagatgttttgaacaatttgcccaatgtcacactgattgtaagcactggttaattctacaatcatttgtacaatgcaaatcagcacaaacatcaccttgaaagcagggttgcagtttataagacctgaatagtcctcaatagctttaattgtttgtgtttaggagttattctaagaattatggttttaattggcccacgcaagtgaaaaatgtggaaaagcattctactaaggtattgctaagtgctattaaataaggatgacttaaataatgggaataagataaatgtattatattcttagtcatagtgaggaaccatatttcaaatgacttcttttggtaagtgattatttaatgcggttttacataatgacataagaaagagagttataggattaatagcaaaaataagtgtgaaaatgatttctaaattgtaattcatctttcttcaaaaggctataaattaaattagtgtggaatccttatctaatattaatctttactttgaagattggataacagctgcttgggtaacaggtgcaccaaaatctcagaaatcaccactaaataacttatccatgtaaccaaaataatattaatctttactttgaaggtaaactgcattgttctccttaatgtataaaaagggttctaaatatgaaaaatgttaactctaggccaggcacggtggcttacacctgtaatcccagcactttgggaggccgaggcgggtggatcaagaggtcaagagttggagagtttcctggccaacatggggaaaccccgtctctactaaaaatacaaaaataagctgggcgtggtggcatgtgcctgcagtcccagctacttgggaggttgaggcaggagaatcacttgaacccaggaggcagaggttgcagtgagccgagatcatgccatcgaactccagcctggcgacagagcgagactccgtctaaaaagaaaaatgttaactctgtatgcattatgtttcataagtcttggaaaagttgtttcattttcacttaaaaggagctactcaaaacattagaaataactttttaaatagcttaaaataaggtattgaatatgtaaataatgcacattgatacaatatcatgcaaagctgctacaggttataatgtagaattgtattaaatgacaggaaacttgtcaacaataagctattaagtgaaaagtagaagcaggttacacaatgcctgattctaagtttgagaaagacaaactgataaatagaggcatcttgatctaaaatacatcttaacaaaatgcaccaacatcttagaatagttcccttcgaatattggaatgaagcctgcttagtatttttttcctttttgtagctcagtaatttctgttttcaacaataaagtagatattacttttgtaatgataaaataatttttaaaagatctgagatcccaaattttgccatatgctagtcagtagtttctgtttattcttctactgttacaacaatactttgctttgtacagttaatattagagggcaaaaactatctgtaaaaaaattttcttcacctgtatcaatgtttaatgagtaaaattaaacaaaattggaattgataaaatgtatttttttattttacaaaaatatagaacgtagtttttaaatgaatgatatatcttgagttcatggttataatacaaaatgacttatttttatcgaccatccggtttgtaaaaaatgaattgcaccacagttttatagcgagagcaatacgcttctttctcttgaagaaaaatgagcggtgacacacttttgtgatccaagcctgccccctggtgaccaactggtcaccacgaggctgcagactatgaggcaggcagcgccctctttaaagctgttcagaagtaacctcgaaaagaaaacgtggcattactggaggtacatttccctgtaatgccccaggcatctccatcagtgtctcaacatcatcaagtgcgggaaagatagcattaaaaagttataaaataaaaaagtcattttcgtactgtcttgacgtgcacaccgtgatgttgagacagacactgatggagaagcataagaatgatgtaatggtctttgcagactcagggaacaagagtgggaggggggtgagggataaaagactgcacattgggtacagtgtacactgcttgggtaacaggtgcaccaaaatctcagaaatcaccactaaataacttatccatgtaaccaaaaaccaccttaccccacaaaaccatggaaataaaaattaaaattaaaaagtaatatctcgaggtataacaggaatgtacaaactgaaacgacagggttaattctcaacacattcttctgctctttcctaaagggaaaaaaataacacagatgtggcaaatttgaaggaggatctctaataggaaataatctgatgaaatttattcaccaggtgctgagaaaattgtatttaagcatccatgttaaagtctaacggatcatgaacactaagtgaaatatataaagtatcagtctatttctaatatgaatctacacttttttgtctctaattctgagagaaagaataattagaaggggaattcaaagaggaaacacgaagagagcttcaagagtaagagctgctttgccagaaagcagtgacacagtcatcagtccttttctttggggaaagtacagtcaccaatgctacctgttattttgttaaaacaagactgcacttttctccctctataaaaggcagtactgatcctggcatcataatgaagccataaggccatttggtaaaatgtgatgcttccagggtctccatttaggtggttcaaaattggactcaaaaacaccaccaccaccctaaggggacgaaagaaacaataactggtccacattgacatcacttctgtcttttacagtggctttaaatgtatgtatgaatgtcaacattcttgatataattttatctttttcttagacatggaaaccagagtcttaaattgcgttacaaagttcttcaaccactattactattactttaaaaaaaatatgccataggaaacttgaggtcaggtgagacagttaatcattaagatttgatttgggactcttaaaagtctttaatgaaaggcctgggtgttcataatatatcaaaaatttggagaagcaagatctgaagttagaacatcagaaaaccagaattagaatcatgagaaaacctccatgaaatttttccttcattgtcttgagaattttagcacttgtcgttgtggaaatgccacactttggcaggtcaaggtgggcgaatcacttgagcccaggagtttgagactagcctggggaacatggtgaaatcttgtctctacaaaaagtagaaaaaaagttagctaggtgcagtagtgcacgtctgtgttcccaactactcgggaggctgaggtcggaggatcacttgagcctgggaggtcaaggctgcagtgagccgagatcgaaccactgcactccagcctgggccaccagagtgagacctgtcttaaaaaaaaaattaaaatgccatataactactgcttatacccaggacctttattagtgagatcaacaaaatatcttatttgttactacagttcacacacaggatctttataaactacacattatgctaaaaaaagagactaaaccaacagtttatgtaaaatcaagcggtatgtaggatataaatggattttgacattgacagcattgaaaataagaagcaattcaatgaatgttaggattaaaaggaatacacatttttcagccctcattctttaatttacatataaagaaataggccctcaaaatgtggccaatttccagtcatgtagacagacacagagaaaaatgaaatgaatattcagatgtaaaccctccttcatctgcacccattctgttctcatctccttcctctatctgtacactgaacctatcctttctctaggtcgtacgtgtcttgatttttccccctcctttaccttgtacaagattcttttccatcagcatttgaatatatccaagtctctgtatctaaaacgaaaatgaaatggtctctctgtccaacacacacacactctcttccaggcactgccctaccttcctgacctctttgctgccaagtatcttgaaaaaaaagtcccacgtgctagtcttgatggtttcacctcctacctgcctcattataataaaatatgtacccttccgcatggcttctccctagagctcaccaatgactggtgacctactgaatccggaagaagggtttcagttgttcactcccttctcataccatcaatatccaacattattggactattagctgtgccctttcaaagcactcatccttttactttcagcctctctgtctttttgcgggtttgtctttgttttttgctgttgttttgttggtttgtttgttatttgtcttactggctactcattttccatctcattctccttctaacatagaacattaacagctaggtttttcaaggcttggccctgggctcccttttcttcttcttctaagttctctgtctggcaagctcaattgtacacatggcttttattacaaaccacatactagtaatttccaagttcacatccacctctcagacctctcctccgagcaccaggcatgttactcaaactgctcagttgacatctccacttttaatagctatctttcacggaaaatccgttaatagagtcacattgttttatggttaaggaacagaacctttccatatggcctgcaaggccgtgcataatttggggccctaacctcagaggacttactatgccctaggattactccatgccccacttaaattagctttcttttaccatatttctttcattcagaagaactctgctatctgttcccatgtgctaaaaacctcttttctttatctcccattctcttttctccaaggtaaattcctactttagttctcattctaatgtcacatttttaggaaagctttgttagactcatcagacagagttataaactattgggtaactactcttcctagcacctattatagctttagttacatgtttatttgtttgatcagtgtctccattagtctgtaagtaccatgaaggtagagactattttcttcttatacatcattgtgaccaaacagtaaacaggaggtctcacactcaagaaatacttactgaatacattaaaatggagttttatcttttattattcagatgtgaatatttgacacagatatgtaggtcctggtaaaaaaggcattggtgatggctcagattctcatggactccaggccaacaaactgttagttatattcttagctgatagagagaagtgcttggctcatggcatgagttcaataacttgctaaatgattaacaagagaaggtagtaatcacagacaaaataggctatttaatttatcttgttccataaaaatgttccataaaattttagggattataaaagattcaacaagtaagtgtggctatttcagacaagaaagaaacaaaaaaaaatgtgttggcaagaacatagagaaatcggaaccctcgttcgttggtgatgggaatgtaaaatgatgcaaccactgtaggaaacagtatgatgctctctcagtcagttaaacagagaattaccatatgatccagcaattctacttctaagtatacgcctcaaagaattgaaaacacatcccccgcgccacccgcccctccacagagagtggaatattattcatcctcgaaaaggaatggaaagctcccatttatacatttatttatttcagagtgtattgtagattcctatttcattcaagagggtgtaattaagataccatgaatttccccagatttggccagtgggagccccttcaagctgggctctgtgcctttataacacatctccaccattctttgagtacttcatttatcttcatgccttcttgtacttttttcttcatgccttgtacatttcttcatgtcttcttgtacatttttcctcatggcttcatctaggttttaagccccacatgcattagctatatgtcctaatgctctccctcccctctccccacctctgactggccctggtgtgtgttgttcttctccctgtgtgcattatgttcttattgttcaactcccacttatgagtgagaacatgcaattggttttctgtttctgtgttagtttgctgaggctgatggcttccagcttcatccatgtccccacagaggacaggatctcattcctttttatggctgcatagtattccatagtgtatatgtgccacgttttctttattctgtctatcattgatgggcatttggtttggttccaagtctttgctattgtaaatagtgctggaataaacttatgtgtgcatgtgtccttatagtagaatgatttacattcctttgggtatatacccagcaatgggattgctgggtcaaatggtatttctggctctagattcttaaggaatcaccatgctgtcttccacaatggttgaactaatttacatttccatcaacagtagaaaagtgttccaatttctccacagcctcaccagcgtctattgtttcttgacttttaaaaatcaccattctgactggcgtgggatggtatcttgaggttttccttggcatttctctaatgataaattatgttgagctttttaaaatatgtttgttggctgcataaatgtcttcttttgagaagtgtctgttcatatcctttgtccactttttgatgggtttgtttgttttttgttgtaaatttgtttaagttccttgtagtttatggatattagacctttgtcagatgggtagattgcaaaatttttctcccattctgtaggttacctgttcattctaagagtttcttttgctgtgaagaagctctttggttagatcccatttgtcaattttggcttttgttgcaattgcttttggcattttcatcatgaaatctttgcccttgcctatgtcctgaatggtattgcctaagatttcttctagggtttttagggtttggggttttacatttaagtctttaatccatcttgagttaatttttgtataacatttaaggaaggggtccagtttcagttttctgcatatagctagccacttttcccaggaccatttattaaatagggaatcctttcctcattgctggtttttgtcaggtttgtcaaagatcagatggttgtagatgagtggtgttatttctgaggtctctgttctgttccatttgtctatatgtttgttttggtaccagtatcatgctgctttggttactgtagccttgtagtatagtataaagtcaggtagtgtgatgcagtggtttgtagttctccttgaaaaggtccttcacatcccttgttagctgtattcctaggtattttggtctctatgtagcaattgtgaatgagattttattcattactttgctctctgcttgtctattgtttgtgtataagaatgcttgagatttttgcacattgatttggataatttttaacatgaaacgatgttgaatttaatcaaaggccttagctgcatctattgagataatcatatggtttttgtcattgattctgtttatgtgatgaattatgtttattgatttgcatatgttgaatcagccttgcattccagggatgaagccaacttgattgtggtggataaactttttgatatgatgctggattcggtttgccagtattttattgaggatatttgcattgatgttcatcagggatataggcctaaagttttctttgattattgtgtctctgcccttgtatttgcctcaatgttttcttataacaatttcatggtttgaggtcttagacttaagtttttaatccattttaattggattatggtatatggtgagagatagggatcaagtttcattcatctgcatatggatattcagttttccctgcacaatttattgaagaagctgtcctttctccagtacatgctcttgggaacttgtcaaaaatgagttccctgtaggtgtgcggatttgtttctgggttctctaatctgttccatataggtctatgtgtctgtttttatgccagtgccatgttgttttggttattatagctctgtagtagaattaaaagacaggtaacgtgattcctacagttttgttctttttgcttagactgtctttggctattctgggtcttttgcggttccataaattttaggattgttttttctatttctgtgaagaatgtcactggtattttgatagaaattgcacttaatctgtagattgctttgaaaagtatgaacatttttacaatattgatccttccaattaatgaatatggaatatttctccattttttggtgtactcttctatttatttcataagcattttatagtttacatatagagatctttcacttgtttgattaagttaattgctaggcatttaattttttgtgaggttattgtaaatgggattacattttttatttctctttttcagactgttcacactggcatatagaaatgctaatgatttctgtatgttcattttttattctgaaactttactgaatttatcagttctaatagttttcttgtgtagcttttggatttttctaaatataagattatgccatcttcaaaccaggataatttgactttttccttttcaattttgatgccctttatattttttcttgtctgattgctctagctaatatttccagtgctatgttgaataacagtggtgaaagtggtcatccctgtcatgttccggatcttagaagaaaggctttcagttttaccccattctatatgataccatctttgggtctgtcataaatggcttttttttatgttgaggtatgctccttctataccctctgttttgaggggttttatcatgaagggatgttgaattttattaaatgctttttgtcagcatcaagtgaaatgctcatacagtttttatccttcattctgttgatatgatgtaacacatttattgatgtgcatatctcgaaccatccttgaatcccacttcatcataatgaataatctttctaatgtattgttaaatttggtttgctggtatttttgaggatttttgcatcaatacttgtcagaagcattgttagcatgtagttttctttggtgatgtgtctttgtctggttttggtatcaggttaatactggcctcatacaatgagtttggaagtgttccctcctctatttttcagaatagtttgagtagaattggtattagtttgtctttaaatgtctgctagaattaaacagtgaatccctcaggtcccgggcttttccttaccaagagactttttattatagctttaattttgctacttgttattggtctgttcagaatttttatttctttctggttcaatcttggtagattgtatttgtctaggaatttgtctatttcttctagatattccaatttatttgcatgtagttgctcatagtaggcactaatgatcctttgaaattctgcaatatcagttgtaatgtctcctttttcattcctgattttattatttggatattttgtctttttttcttagcctggttaaagatttgtcaagtttgtttaacatgtaaaaacacccaactttttgtttcattgattctttgtatttttttattttaatttcatttatttttgctctactctttattatttctacttttctcttaattttttgtttggtttgctcttgctttcctagttctttagggtgcattgtaggattctttatttgaagttattctccttttctgaggtaggcacttattgctataaacttccatctgagtgctgcttttgctgtatcccataggttttggtatgttgtttttccgtattcatttgtttcaagattttttttaaatttccttcttaacttctttattgacccactggtcattcaggagcatattgtttaatttccgtgaatttgtagagttttcagaattcctcctgttattaatctctagttttattccattgttgttagataagatgcttgctattatttcattttttgcatgttttaagacttgttatgtgaccttacatatagtctatccttgagaataatccatgtgctgaggaaaagaatgtgtattctgcaactgttggatgaaatgttctgtaaatatctactagatccatttggtctacagtgcagattcagttctatgtttctttgttgattttctgtctggaagatctgttcaatgctaaaagtggggtgttcaaatctccagctattattgtattgaggcctatctttctctttatctctaataatatttgcttttatattatatcaggatgctccagtgttggggacatatatattaaaaactgttatatctccttgctgaattgacttatcattatgtagtgaactcatttatttcttcttatagttttggtcttgaaatctatttgtctgatataagtataatgactcctcccctttttggtttccattgtcatggaatatctgttttcatccctttgttttcagtctatgtgtatctttataagtgaaatatgttgcttgtaggcatcagatttatggggcttttcatccattcagccagtctatgtcttgattggagtgttttgtccatttatattcaatgtaattattgataagtaaagacttactcctgtcattttgttatttgttttcaggttgttttgtggttttctcttccttccttctttcctgcatgtctttctagagtgaaggtgattttttccagtgatatttggtttcttgcttttcaatttttgaagattcattgtatgatttttgatttgaggttaccatgaggcttgcaaatactatcttataacccatgattttaacttgataacaacttaacactgtttgcataaacaaataaacaaaaactaataaaaatactacatcttaattttgtctccagacttttaaacattttctggtttctatttatatcttatctttctgtgtatgtctggaaaggttgttgtatttattagttttgactggctcatcatttggtctttctacttaagaatagtttacacactacagttacagtggtataatagtctgtggtttttttgtgtgtgtacttactgttatcagtgagtttcataccttcaagtgatttcttatatctcattaccttcttttttctttctgattaaagtactctctttagcatttcttgtagaacaggtatggtgttgatgaaatccctcagcttttgtttggagaagtatttctctttaatgttttaaggatatggcaaagtattttgaggcaacttaatgaaaaataaaatcgtgactaatatatagaaaatttttacttccttttaaagccttcttaatacactcaagtcaaatttagacacttgatgactgactttcagatttccattttggttctccatgtacctctgctgtgaataagaaaataacaatcctataatcccccagtattctcctttatcttatttgaatccttaaatcaccaagaaaaagagtacctttaaatgacttcctcttcagtgtaaaagaggtaaatgtggataatgtttgttttttttttttagtttttttaaatttatttattattattatactttaagttttagggtacatgtgcacaatgtgcaggttagttacatatgtatacatgtgccatgctggtgcgctgcacccactaactcgtcatctagcattaggtatatctcccaatgctatccctcccccctccccccaccccacaacagtccccagagtgtgatgttccccttcctgtgtccatgtgttgttctcattgttcagttcccacctatgagtgagaatatgcggtgtttggttttttgttcttgcgatagtttactgagaatgatgatttccaatttcatccaatgtcccatgggcaaggacttcatgtctaaaacaccaaaagcaatggcaacaaaagccaaaattgacaaatgggatctaattaaactaaagagcttctgcacagcaaaagaaaccaccatcagagtgaacaggcaacctacaacatgggagaaaattttcgcaacctactcatctgacaaagggctaatatccagaatctacaatgaactcaaacaaatttacaagaaaaaaacaaacaaccccatgaagaagtgggcaaaggacatgaacagacacttctcaaaagaagacatttatgcagccaaaaaacacatgaaaaaatgctcaccatcactggccatcagataaatgcaaatcaaaaccacagtgagataccatctcacaccagttagaatggctatcattaaaaagtcaggaaacaacaggtgctggagaggatgtggagaaataggaacatttttacactgttggtgggactgtaaactagttcaaccattgtggaagtcagtgtggcgattcctcagggatctagaactagaaataccatttgacccagccatcccattactgggtatatacccaatggactataaatcatgctgctataaagacacatgcacacgtatgtttattgcggcattattcacaagagcaaagacttggaaccaacccaaatgtccaacaatgatagactggattaagaaaatgtggcacatatacatcatggaatactatgcagccataaaaaatggatgatgttatttttgaaatggagacattgatttcacaacttaagtgtcacatgcagggaacagagcatgagtatttatttgtccttgtccatacagccagcagtgctgacagccccctctcttctggtgtaacaacgggagccaacacctaggtggattcctagagggatgcagttggcaatgacattgttcagacacagaatagtgaaatgagtgttacagcaacagaagcatttcaggccatggtggtgtgaccttcaaagtttgcccggaaatagaaacttctctattatgctttagtaaacactttatattctatctttgatttagcttgccaaactaagaaaatgcttgatctgtttaacattttacattatactgttgatagaatgataaataggctaaattttaacaaaatagcatatgctcattgttgaggttattttacatgcatgctcttagttttcttaatgagcccctatgcctcatgagagtaaattaaccattatttgtatttcctctggatgctcagagacttaaatgtgattcatccagggaagagcttactttttttttttcaagtatagcataaatgaggtgaggtaaagggtaggttattgaattgaaaatataattaatgttactgtctctacatctcagtgataaagcagagagacatgagcttcaatggatacgaatgtgtcactatgtcagtatttgagaaaatctaccttctatcacaccaggtgaatgtttgcctgactaaatgttcacagaaacgtaacatctgaaaaaggaaattttaaaaaatcccaaagtaagtttggctctgaaagctatagatttcctagaaaatatatggtcacagactagatcaatggggacaagttcattagatgttttctgataacatctgtggtgttcagaagagttgaatatgctctggcttgctggggatggcagcgaatttgtataccagggtataaaaagatggctgagcaagctagcaggaacagaaatgaataatacatgcagttgccaatgatacccaaaaagttacagttatgaaaagtggccttcgcttctcttaattgtaaatgatgttacaaaatagtgttgggcgaacatgtaaaagctatgggacttgagatgatacaatttgtttaaaaatctgctaggcatgtgagtcacagtttactatttgggtgtgtcaaaataatagattttctttatttctagatgtacatttaatttctgactcgaggccactaccttcctagtatgaactccctaaacgaattcactgtgaatcttccatttgtgcttttctaagtatcctgcaattaaaccagaattattagtcagcatcagcctggctcacatctccatgtgactctgtcctactcctcttctcagtcctgacctagccctcgaggttcataggtctgtagtctgccaaaagaaaggacaagttaccctaggtggttgtcacccattggtggtggaaagggaggggactgtttcttgttctcctttgctgtttggcagtgacattaactggaactggcatgtttgtacacatttggttcactggcaactccctggcattgcctctgaggttccaggctctttgtagaagttgcagttgcatcataaacaaccttatattcttattgatgtaaaacagaacatttttttttttcctcacgaatgtgctaggttagctggggccacacagctacaagaggcttggtaagttcaggtctactacagggcgggcaaaaggcccagaagctaagtggagtttgctcttctcatggtggttggcagaaatccaggaggagaataagaaatgaattgtgccccataaattcttcttactgcctaatctcactttttcccatatgtcaatctccaaaacaatcacatgtacaagaccaacttaaatggtttggggaattatacattatcacctggtgaaagatggcaaaggtaggggtgaagaagtagacacacaatacaaggtaaaggttatatttaaccaatctctgtctgccaagtccactttcaaattcaaaactaatggaaacaagactcaaaaagatggaagatcagaatatagtatcccagtactttgggaggccaaggcaggtggatcacctgaggtcaggagttcgagaacagcctggccaacatgatgaaaccctgtctctactaaaaataataataataaaaaatagcctcatgtggtggcaggcacctgtaatctcagctactcagggggctgaggcaggagagtcacttgaacctgagagtcggaggttgcagtgagctgaggtcatgccattgcactccagcctgggcaacaggagcgagactccatctctctctctctctctctctctctctctatatatatatatatatatacacacacacacacacacacacatatcttatctctctatgtgtatatatatatatctgactgaatttttatatatatatcttatatctctctctctctatatatatatatatctatgtttgtatagatatatcttttcttacaggtaagactgattgggaaaataaacatgattctgtaggcaaaactggaatttcaaatacccaactccttgactgttacttacccactgtattattcagggttcttcagagagacagaactaatagatatccagatgattgattgatagatagatatatagatagatggatagataatagatgatagatagatagatatagatagatagatagatatagatgatagatagatagatagatagatagatagataatagatgatagatagatataagagaggaaatttgctccgtgaattggctcatgtgactagggaagctgagaagtcccacgatggcctatctgtaagctggagaaccaggaaagccaatagtacagctcagaccaagtccaaagacctcagaaccagggatgcctaaggttcaacttttagcatgaggctgaaggcctgagaacttggtgcagggaaaggtgctggtgtaaggccccaagtccaaagattagaaaacctggaatttggatgttcaagagcagcagaatgttgttctcagctgaatgatgctcttcagctacagaagagagagacaaagtaaattcaccatctgtctgcctttttgttttatctgggccctcagccaattggatggtgcctgcttacattgagggtggatcttccttactcagtcaaccaattcaaaccagtcgcttcttgaaacatcctcacagacatagccagaaataatgttttattaaatatttgggtatcctttaatttagtaaagttgataactaaaattaacaatcacacctatccagaaattcagtcagcaattgtaacctttctgtaatgaggaagaaaataccagacaggcatctctaaaacaaaaggaaccctgaatagaatgacccatgctcacagacaatctctaactcccaatctcaccacaagacactattaggatgcactttgcccttgggaaagagaagcgagaggtaggaagaagttatatgtattcttagcagaattttcttccctgaggaatatagacattttcatcccactttagaattatggaagaaagatactatggtgttctaacaaaccactcttctgattcctgttgcagcttccacgctgcttctctggttgcaagcattttcgtcctgccttggagagcctctcaattccacctcagcttaatttgtgtttttcctgggtccctctcctctctcaattggccaacataattaaagtgaagattctccactaccagtgaaccatgtgagaagggaaggaggattgtatacaaccatatattttctggtgtggaacaccaggccattaatccaaacaattcccaaaatgaccatgagtggtggtgaggcaacgacttaaatttttttttttttttttttttttttttgagagggagtctcactctgtcacccaggctggagtgcagtggcatgatctcggctcactgcaacctccgcctcccgggttcaagtagttctcctgcctcagcctcccgagtagctgggactacaggcatgcaccaccatgcccagttagtttttgtatttttagtggacacagggtttcactatgctggccaggctggtctcgaactcctgacctcgtgatccaccctcctcagcctcccaaagtgctgggattacaggcatgaaccaccgcgaccagccagcatcaacttactttgaatctgacatccctcagacaacagagcaggcttttccaagagtctcatttgtttgcctccctctactcctgcaggttttattccagggttgtggaataaaacttgattcctatttcttttctttctcaattcggtcatctcccccatgctactcttatctcctcttatgtgtttgtaccactaggcaactctgtatcgctcatacccagattggtatgtcttcaatttaggatttaatatctgaaagtttcacatttagagcaatatttatagtttctttgttgtggccaaaagtgaaaaagtagaaatacagtacagagaagtagataaaaaataatttcccaataataaagcacttacaatcctactacacagaaaccatatatacttcactcattcatatattttttcatttgtcacatgttccaagaccttcttctgtatttaaagttctcttgtaaacattgaatattgcactgtgatcactataggaatgtatgtcatcctcatatacttataatttattgagatactgatttctatagattttcctttgttttcaattaaacatgttttcaaatgaagagtatcagacttttcctgacttttggctattttaaactagtaaatttaagctaaatttcttttaagattacataagatctttaaaacaacaacaaaacacaagatatacaagtctcattgttgtgctcttttttggtccagtgagcattcaacatatataaaatagtgtagaatactaatatgttaatgtattttgttcctggcaaatttaccaaataattctatgtagttctgaatcattgttgtttcattttataattttttgaaaattcagctttcatttgtcttccacagctgcgtcacatcctaagcatatctcatatccagaattttttttgctaattcattagattttacttttcaccaaagaaaaataatggggttactttaggatataaacccactgattttggtatcaattaataatatatgaaatctaattttgaaagtattttctctgcttttttcttgatttaaaattacattgtttaagggcatcaaaaattatattcaacaaatatttgtcatcaagctacatgtttactacattttgaattattttcaataggcattttcagcctaggcttttctttattcaacttatccctcattacccatctctccaagctgtagacattgacatcctgcctggcacttgacaatttccaaatctgggagttggactttgtttcctgcttcctcaacaactggctaggattaagcccacccagttgataaaacattcaccaggaagacaacaaacatactgcatggcttgtcaaaccactttggaatttatcatattattttttaaaactttaaattttttattttatgtatttattgatttttgagatggagtctcccgctgttgcccaggctggagtgcagtggcatgatctcggctcactgcaacctctgcctcctgggttcaagcaattctcctgcctcagcctcctgagtagctgcgactacaggcacgcactgccacgcccgactaattttttttggtatttttactagagatgaggtttcactgcactccagcctgggtgacagagtgagactctgtctcaaataaataaataaataataaatactgatgtccttacatcagccaagggtagcaatattggtaacttttaattaaaacagaaaaccatttttattttcaggcaaagcatgagcccagtagtagagctactaaacctaatcagcaacatctctcatgtcctttcacaaaacacgctttaaaaatcttgacccacaacattttattcccctgcagaaactatgcatttgtaactgatatggcttggatgttttgtccccccactccaaatcttttgttgaaatgtgacctccaatgctgaaggtggagcctggtaggaggtgtttgcgtcatggagatggatccctcatggatggcttggtgctgtcctcacagcagtgagtgagttctcactctgtgagttcatttgagacatggttgtttaatagaaactggtagctccacctttttcctcttgcccactctcttgccatgtgatacacctgcttcccctttgccttccatcatgatcataacctcaccagaagcagatgctggcactatgcttaatgtacagcctgcagaatcacgagccaattaaaactcttttctttatgaattaattacccagtctcaggtattccattagaacaatgcaaataaactaacacagaaaattggtactgaagagtgggacgttgctataaagattcctgaaattgcggaaacagctttaaaactgggtgacatgcggaggttggaatatcggagggctcagaggaaaacgggaagatgagagaaagtttagaacttctcagagactgaatagtagtgaccaaaacgttgatagaaatatggacagtaaaggtcaggctcaaaagttttcagatgaaaatgaagaagtcattgggaactggagtaaagaacacccatgttatgcccaagcaaagaacttggctgcattgtgtccatggcttaggggtttgtagaaaggtaaacttaacagtgatgacctagggtaaatggtggaaaaatctgtaaacagcacatcattgctgtagcaatgatgtgctgtagctgcttcgaacagcctatgatcaaatacaggagcaaggaaatgccttaaagttggaacttgtaattaaaagggaagcagagcattaaaagtttgggaaatttgcagcctggtttggccatatggtagaaagggagaaaacatttttaggagaggaatacaagaagggcgtggagaaaccacttgctagagaggtttgtgtgactaaatgggagtcaactgctaatagtcaagacaatgggaaaaaggcctcaaaggcatttcagacatctctgggtcagccccctcccattacaggccctaaggcctagcagaacagaatggcttcctgggccagggccagggacttgctaaccttcacaactttggaacacggctctctgtatccctgctgcttcagctcccgcctgactcaaaggactgagccaatgccccagagggtgcaaaccataagccgtggtggcttccatgtggtgttaagtctgccggcacaacagaatgcaagaatgaaggaagcttggaagcttccacctagatttcagaggatgtattggaaagcttggatgccaagatagaaacctgccacagaggcaatgcccctgtagaaaggctgtactagggaaattccaaggataaaggtggaattggagcccatacagtccccaccaaggcactgcctagtggaacaatgggatgggggctgctgtcccatagacctaagaataatagagccactggaaacttccatatgtgcctagagaagccacaggcactggactccaacctgcgagagcagctacaggtgctgcaccttgcaaagccacaggggcaaaaatgcctaacatcttgggagtccaccccttgcaacaatgtgcccaggatgtgggacacagagttaaggaaataattttggagctttaaagatttaatgacggctctgctgggtttcagaaatgtgtggggcctgttgtccttttcttttggctgacttctcccttttggcgtgacaatgcttactcaattcctgcaccgccattgcatctcgaagtaaataattaatttctttttttattttttattttacaagctcataggtgaaagaaacttgccttgagtccccaatgagactttgaattttggacttttgagtgatgctggaatgagctgaggcttttaaagactattgggaagggatgattgtattttgcaatgtgagatgaacataagatttggggtcccagagatggaataatatggctagtatattttgtcctctctaaatctcatgttgaaatgtaatctccaaagttagtggtggggcctgtggaaggtgtttgggtcatggggacaaatccctcgtgaatggcttggtgccatccttgaagtaatatgtaagctctcaatttgagttcaagtgagatctggttgtataaaagagcctggcaccttcttctcctctctcttcctctctctcatcatgtgatatatctgctccccatttgccttccatcaattgtaagcttcctgaggccctcaccagaagcagatattggcactatgtttcatgtacagactgcagaatcatgagccaaataaacctcttttctttatcaattacccagtctcaggtattcctttacagtgatgaaaacagactaatctagttactgaaaacctctatgaatgaagactttgcccacattttcactatgtatcccagattttctagaaggtatttccgaatataattgcaaaagcaaacatatagtagtggttctgattgcagaaattttagagtagcttgtatcagactatccattagaaagagaataaataaactaaattccagcactgacagcagagtaaaaacctgtctccaatacataaataagtcgataaataaataagtaacaaataagctttgaacaaatagagttaaaaaaagtttgaagacattggagactagacacaaatgagcaaatcctggatggagtttggcccttgaaaaggagaatggcaaggatgagatctcatttgtacatcttttccctcttagggggaaaaaaagacaaaaataaaagtattggaaacagtaaatgagagaatacacaaaatttacaaaggaacaaatacataaataattgctaatgtcacattaaaaaaatgaaaataagaagaaaaggaatcttatctttaaattccttaaaataaaaacaaaaattttaaatcagcatgctgcatcaagtcaaaaataacttatttggttaaataaatatatattttaggtaaacgaaagctgagaagatatatttctcaagttctgtactataagaaatgctaaaataaatacttcagaataaagtgaaatgactatagacagtgacagagattcacaggaagaaataaagaccactaaaaataagagctttcttttaatttctttaaaagaaaattgacaatttaatgcaaaaaatataaggttgaattataaaatttataagtagatttaaaatgtatggcaccaataatgttactgaattcatatgggtctgcagcaaccttagttttttcctcttcaggaaaaacaaattgaccaaagaggcagaaggagaaaccagagcaaattttagagcaagagtgaaagtttatcagaagtctttggaacaggaatggaaggaagtaaagtacacttggaagaggaacaagtgggtgacatgagagataaagtgcacggtttgacctttggacttgggattttatacattagcatacttccaggatctcgcatcccttctctcctgattcttcccttggggtgggctgtcacatgtgcagtgaactgccagcacttgggaggggagcatgcacagtgtgtttactggacctgtacacatgctcaattgaggtgttctccccttaccagccaaatgtcccttggtggtaatataccagttaaactcttccattttacctcttagtgcacatgcccaagcccactcactcaactcctgagatcttattagaaagctgcttatcaccagtttcaggtgtttctgtttcttgggagactgcctttccctggcactggctgtgaccatttgttatttagagagatggtttactaaccacctgaccatcacctgatggatgcctgacattcctagagtgggagtgctctcctacccttcttgtgtgtgactagctacctactgtaacaacttccctttcaagagtccaagacctcaattctttggagaaaaatggatgaaggtcagtcttctgtaactgcttccttctcacagaggggcaatggtggttctgtgggtcttggcctttggctagttgccagggaagggtttgctttgtgagctggtgaaagcagtatccagccaggtccaaaggagacacaggcaggattttacttctgtcatgtctcactgatgggcagtctaggggtctcctgcaggagggtgactcttaaatattgagaggatggtatccctcaataatgatcatctagagcttgatggcctgaaggcaagagaagacaaatcaggttattagatttagcagaatgttaaaatgaagtaagggggtgatgacagctgacacacccaggtagctggtggctatagtcataactgctaagaattgggcgtgtgggggtgctagccaattccaatatgtgccaagaattgcaatactgaagcagattttttcattacccatcccttttgtttcttctgagctgcagccagagatcactactagttggttcactggagtaagtagggtgagtctaaattgcagacaaaaactcaaaaacaactgatgaggctagaacttaatcacaggtgtaccatagttcttcaaacataatttttctctctccagatcttatttttatgaaaaataaatcctgataggactgatgtgcttgcaaaataagttctagtcttattacacttggccagattatttgcatgaatcacagcaagaataatcattttccagaaagtgacattttttacttatgtcaggaaccctgtacagggactgtgtagacaaggtgtgaggccagttttcccaaggggttttattgtctctataagtcaaatttggttccttaaagaaatgcacattatttcagtcaaagccttgataaaataaccagtgtctctaattgtgtcctgttgcaaaagaaaatagattcatattgcatttatgcaaataactgtattgccatgagttaagaatattcacaaatagttttcaaattcaggagaaatcaggtaggaagaaaaaacattatgcttcaaattatgttgatagtagtataatttatttactcaattctttaaaagctgtaaataatgcaaaagaaaattttcttgtcttttaaaaacgaaggattaacaacattttaagcaaaaactcataaaagaattattttagtcttctactagtttagtccatgttctgcttgatattcatgaacattttagctctccatatctctaatgacacaatctttgaagtgatcaaaaacctgtgttttagaacacctgttagagtattacagctgtttataaaacctccttctaaaaataatcaaaacaagacaactaatgttcgtggatgacaaaacatcttagggcaggcacagtcaaagatacaattgacaaggaaatttgttaacttggtggtacacaataatttaacataataattataattattcctgatagcatatattaacttatatcagagtcataggaattttgcataattttggaacacacataccaataacacatttataaaaatataggccaatgaaatccaaatgttacctttgcattagtgtgctattgatgtcaaacccaactcaataaaaccttaataggcaaatctgttcaattttaatcagcctgatcataaggtaagattctcatgaacattttataagcctttacaattttctgttaaagagcagaacaatactctaagaaaattgtgttgtgtttttattccaatgtttaatttacagataagctgaataatacccttttaattttagctaatatgttcactcacacaatttcttttacatgattaatttttcacaaacattccacaacttacttaaacttttaactttatctaatctaactttaaacaacaccttaaccctctaaaataagcaatagaaatagagctattatagagaaagatgaattcagaagttgggtaaatattaagcaggtacctgtcttggtaaatacatttttgccccaaagaggtgtgaatattttctttggaggcaggaggtgccatgtgcctcattacctgacatgatttggaggagagttgctagagaagattagcacagagtagtcagctcttgaacccaaaagggaaaattataattttacttgctgcctccatagttgtccttgttctcttgatgacaatgtctgaactgggagctggctgaagcagagagccctttcagttcaaggtcaccagggttgggattctgtcctggggcccttaagccctcagagaagttccatttcagtggttgagcttgtggcacagaggacaagccatgtgggtctttttcctatttatctcactgacagtttaccttccagtggcctggcttccagcaccaatggcaattacctggaggaatgtccttaggacaacctggagggagattgagagcttgtaaggtagccaatacttgatcttgccttttgtccctgcatttttcctttttcttaaccctgttctccttattctactcttggttatacaagactgagaaagctaatctgaggacctcctgcacagggtcactgggttctatgactgacttttgtaatttcctcccagttaatacttaggccaaacaagattacaaagtaaaactatttttttgttttaaggtttggggaaatcaaacttttcccccctttgggggatgcatctgtggggcatgtcctatagtatgaagacataattacccatctgtgaagagagaacagaaaagagaaaaagaaaaaaggaataacaaggtcttccctctactttcctattatcctgaatggggcatcccccaatgtccttaggcatgaactggtataactgtgtacctttggtcccatctcatcacaactactcacttaagaatatgtacccctaaccttccctttatctctgttctaatggtaatctgttagcctgggaccacctttcctctctgtcctatgggtctcttgtacctgtggccttgggccagcctatatccttatttccatgaccttatagtgacactttcttggaatattccagcaaaaaaaaaagatactctcttttctcagctttccatttcccatgttctttaagtagaagagaagcctgtttttcagctaactgcccaaaggggagttatggactttcctccattctcccttcaaatatgaccttgagggtcttgatgcatgttgtgaagaatgcagaagtaattagagaaatggaggatacagaaggaagtggtaggaagcaagaggaataatcatggaaagccttaatacgcttgtaaatatagcagcccttgaattcaagagagcaatgtttattttccctcttgatataaattaagaacctttggaagacttagcgcttgggggaagaactcacaattggcaaaagaagaattctccctccttccaaatgggtgctaactcaaaaaaagtaagtaggtgggatccttaaaggatcagagtgaggccctatgcagttagacaaactgcttcaaaagccactgaaaactcgactctgaggtataacaggaacaaaaagtatatggtaagtcataaggagctggcagagctggggttccaagtagtgtctgtcctggaaatgtgtcagcagacaagggaagggtttgtggtcatctgagctagtagggtaaacacaagtataaatctcagggtatttctgcaaggcagcctgtgtctttgctgccagacaaatgcagcaagagccatgggtgcacaaataacagggtgtgtttaaaaattcatgtggcatgtgaagtgaaagcaaagaggcagacttgcctccaaagcagatagtcctgtgggtgtgcaaggccatttcagaatacatgcagagaaaacaggagaatatgctgtttgcgtttttggaaagagctgattttagttgaaaaggtagaggaaaccctagacattgcacggttttaggctttagccctacctttctcacaagcctcctgtccaggagggccattagcatctcagatctactcagtgtaaaccccaaggttattcccacctctgcaagctgccagtcagggtcagctgagagatcagcctggtgggtgtgtgtgagcagagtcacttatggccaagaggaattgttctgggggtttgttagtaagcaggagaaagaaggggagaagaaaactgtgtatgggtgttgaacacctcccaccgaagcaagtgaggaataaagatctcttaccattgaagaccatgtcgaagtcatggaaacaaaatatgttaatggccaaacgtattagagacccatggcaccaaagtatgttagcagtggaaggtatctgagtcacatggcacaaaaatatgttcccagcaaaacatatctgtgtcacggcaccaaagtatgtcaccagcagtaaatccttatgggtctacagcaacctcaattcttgcctcttcagaagaaataattcaaacaaggaggtataaggcagaaggagagatacagacaagttttagagcaggagtgaaagtttattagaaagctttagaacaggaatgaaagaaagtaaagtacacttggaagagggccaagtgggcgactggcgggatcaagtgtgtggtttgtccttttgacttggagtttgatatgttgacatgcttcctggttcttgagtctcttctccctgattcttccctaggggtgggctgcccgcatgtgcaggggcctgccagcacttgggaggtgagcaggcacagcatgtttattgtatatgcatgcatgctcacttgaggtgtccttccctaaccagccaaatatccctagaaggacatataccagttaaactccacaattttgcctcttagtgtgcatatttgagcccagtcacccagctcctgagatcttattgggaagctgctgatcaccagtctcaggtgtttctgcttattggaagactgcctttccccggcactggctataaccaattattattttagagaaacagtataacagctccctgaccttcacttgatggtcccctgacattcctgtttgggacagggggaaggggctctcctaccctgctcatatctaactacccacttgtaagagcaatacaaagaatagatatatggtcttatatatacatcttacgtacaatatcatttcaagcttctcacacttcaaattaaatgctgccatattaactctaagtagcttacagtaagtgaaagatgcctactgtaatccctatagtaagcactacaattcacaaaatggcatagccaaaaagtcaatggtagaagtaaaatgtaacactgaaagattaacataacccagaagaaggcagaaaaggaagaacagcaaaacaaaatcggaagaaatgaaaacacaattacagaaaattagctaatggagattagaaaaattacaaatgtaacccaactatactaattattacattagctgttgttatattgtcagatttaataaaataatcaagatccaaacatcctctttaaaagatatgtatatttaacataaagaaacaggtagactaaaacaagcaagaccaaaagacctcttttgtttttttaactttgttttaggttcaggatatttgcagcaaatatcctctttaaagatatgtatatttaatatagggcacaaatagactaaaacataaaacatggaaaaagatatactatctaaaatgtaaaaatgtaaattgtatgaatactgtaatatcaaagtatgctccagtacaataaacattacctgaaataaagcgcagcatttcattaagacataacaatcatacatgtttgcatacttaattaacagagcttcaaaatacagccatgtactgcataaagttgtttctgttttgcatacataacggtggtcccatagcattataatggagctcaaaaatttatagccgttgtaatgcagtgtgatgcattactcacgtgcctgtagtggtgctgatgtaaatatacctactttatgatgtcaaaatgttgtagtaactaagttgaatttatgattgaagaaaaatatttttgataagtttagtgtagctgaagtgtacaatgtgtatctagtctacagtagagtgcagtgatgtgttcggccttcacattcactcactagtgcttcattgactcacccagagcaacttccaatcgtgcaagctccgttcaaggtaagtgccctatacaagtgtaccagtttttatcttttatactttatttttaccataccttttctctgtttacttatgtttagatgtgcaaatatttaacattgtgttataattgcctacagtattcagcacagaagcctgctgaggtttgtaaccaaggaacagaagtcataccatctaggctaagtgtgtagtaggctatagacttgtgtaagtgcattctatgatgttcacacaatgacaaaatcacctaacaacgcattgctcatactgtatttctgtggttaaacgatgcatgacagtatgtaaaacgaaaacaaaaaaagtaaaggaaaaaatggacaattacaggttttaatattgaattatcactgactgatagattagttagacacaagaccaggaaagatacataggatctaaaacacactatcaatgacctttttctaattgacgtttgtagaacactgaagaatatgtcacagttacgaaacttcagaaaatgcattattttcagttgcatattaaacgttcaccaagacagaatatatgctggcccaaaataaatctcaagaaatgtcaaaaattgaagtcatataagaatatttattcacagccataaaattaaatttgatactataacattaaactagacagaattgttcaaatgtttggaaaaataattaatcaagaaagaaatcacaagaaaacaatttagaatctcattataatgataacaacacgtatcaacatttgtgaaatgcaggtaacattgtgcttaaagggcaattcatagccgtaaatattttaagaaaataagaaaggttaacatcagtgatataattttccatcttaagcaactagaaaaagataagcaatttatatacagagtaaatagaaggaaagaaattataaagatatgagaaattaagtagagaatagataaaaatgtttagattaataaattgataaacccctagcaagactgattaagaaaaaaaacttatttattatcagaaataataaaaggtattacaatatgcaaatattcatgaaaaactctattccaacaaacttaaagattttgatatggacaaatttttggaaaaatacaacatagtaaaactgacataaaaaatagaatgtctgaatagctctatacctattaactaaactgaaattgttattaaaaagcctttctccaaagaaaaatacaagacaatacattggtgaagtatataaaatatatgagtattaaataatactagtactaagcaaaatctaaaacattatctggttgttcttatcataaaaagcaggaaaaagaagaagaagaggtgaaggaagaggaaaaggaggtggaggagtagaaggagttaatgatgcagaaaaagaaaattcaatttttaaaaactcaatccaatttacatttttactcccctaaattatgattctatttctatcctttcattcaacatgaaactcattttctaccgtggcccttgcaatttgtgttaaatcctgaacaaactaatgaaactaatttcttgagagcacacagatttaccttctttctcttctatttgcacaagttcttttctcttccaggacttttatttcttatctgaatggtttctgcttagctacaaatttccaagattatagtgtttccatgaaattttaagtgaagaggatactaggataaagctcaaaagagatggtaggcttagaaaggctttgcaattgatattaaaagaacaattgagtagtaattgtccccatgcttgggtgaagtttttggctttttatctttaccaaattattgcctccctctgccacaataagtaaggaacatttaatttaaaaagcaaaatttaaatagtagtactacaataaactcatcaatattaactaattgttttgaacatttacttaactgaacaagatctttactatagattgtaatagctatgtttaagaaaagtatctcctaacattaatcaaaagattaaaatgacttgttatatttgttacaatataattctcaactctggaattttctatcaatagaaagttcattctgcaaaattatttgtattttatttattatttatttattattattattattatttgagactgagtctcactctctcacccagactggagtgcagtggtgccatcttgtctcactgcaatctccgcctcccgaattcaagcaattctcaagccttagcttccctggtagctgggattacaggcacccgccaccatgcacggttaatttttgtatttttagtagagagggggtttcaccaatgtggccaggctggtctcgaactcctgacctcaagtgatccaccagtctcggcctcccaaagtgctgggattacaggtatgagccactgtgcccggcctgcaaaactatttttaatgtcattgtagaagtagcaccttattcatgctaaggaatatagctatacagacatgacatgtaacttccaagcttgattcgtgagatttcaaagaaatttagaaaaagtcttctatctaccatatgtgcatattctgagcttcagtgttttttttcagtagtatgtttgccaaaggggtccattattttctccctcagacaatgaaatatttagacttatggctcagttttgcaagtgaaatgctcaagggaacatggactgggagagaacaaatgaaataatttaatatttacagcacattatttttgcaataattattttggagtcaccgattcaatattatccttttttatcttgttatttatgcatgtaattttattttatttatttttttttttgagacagagtctggttctgtcacccaggcagaagtgcagtggcacaatctcagctctatgtatgtgatttataataatatatcatgattaaaaacatgtttcaaacgtttattttacaaaagctagttttatatgcttcctttgaagttaacataattgccttatcgccagttaagtcaatatcctcagatttaataaaaagttgtcagaacatgtccttaagattttagtagttacaaaaagtggtatgcatgtaataatattataaattttcctttggcacaatttctattttttaatatgctgtaataaataacatatttgtgttattttccataaaaccaggataaaacacaatcaaattatgagtatgaactgagaatcaatgaacttcaggagatattaatagccacatgtgctgattttagctaattctatggactgttactatatacaataagatgtactacatttctgaaagactatgctatagctacaacttgaattctcccagtgaaagatatttcatgaaatcatgaagaattctttacactgttactttgtaagctctaattttagaaggatcctcttataaagaaccaatttctaccttccttttcattttaactgatggctggcagtgctattgtcagcaattatgcagccctttagtattagcttcttcattctaagtgacagctcaaacaacattaaaaaccatcatctctttccataactgccttgagctcaccaacactttcacacatttatcacagccacctgttcatgaaacacaacatttagtttttttccttcagtgtatagtgtgtttgtagttcttttagctaatctgaatatgctatttcccttgccctgattttatgccatcatgattatctcataaaagactttttctgtgccagttgtatcatggtcctacaatcaattaacagaatgtcaaaaaagtaacttcatttctttgtattcctaaatagtctcctgatataaaacaggaaattaaatgaccaagttatatttctttttctgctaaaatatataaagcaaagcagggagacaatgacttgactgaactgtctcaaactttgtgctctttttatgtacacaaatacaaaaaataaataaatacattgtacatttaggaaattttagaaactatacactagaaaagaaaacatggcacatatacaccatggaatactatgcagccataaaaaaggatgagttcatgtcctttgcagggacatggatgaagttggaaaccatcattctcagcaaactaacacaagaacagaaaaccaaacaccgcatgttctcactcataagtgagagttgaacaatgagaacacatggacacagggagggaaacatcacacaccggggcctgttgggggatgggggctaggggagggatagcattaggaaaaatacctaatgtagatgatgggttgatgggtgcaggaaaccaccatggcacgtgtatacctatgtaaaaaacctgcatgttctgcacgtgtattctagaacttaaagtataataaataaatttaaaaatagaattttaaatgttcactatagaacttgttctaaacattcaatgatgtgctttactggacgataaaatatcggtaactcaaataggcaaattttcattaccaaactggtagtgtggacaagccaccataatccattttaagttgatctttatagtaaatttgctcagaaaaattagatatacacaaatatgtcaacagaaaaattgataaaaggtttaaagagataaaaataaataaatgcaataaattatttggtcaacttgaagtcagtttgaatgacaataagcactaaatttgcatatcattatgaaaaatattagacaattcgttttctgttactgatgatttactgtagtgtgatctgtaatgaataacttccttctgaatagtaatttggcaggcttaaatacctttgaaatattcatagacttagaaacagtaatttgcctcaccatgaatttattctatgggctaatgaaatgtacccacaaatatttctttctaggtgtcttcattacgttattatttgtaaaaatactgtgtatctcctgaatggtcaaaataagggataattaaaatgttcaatgtgtttatttcatgcagtggattgtacatattcattatactctactttcctgagcaatatttcatacattaaataatctcataattcatttttgatgggaaaattatgggacagagtagggcttatataatattataaagagttttaattttttgtattgccaaaaccaggggaagatacaccaaaatactaatttcaatgtaagtattatttttaatttcaatatatttgccccaagagagggtgaaaattcccagggacattacaaagataaaggtaaggctagaataagtaatatgttagggattttattgtatttccccaaatgtatgtgttgtagtcctaaccctcactacttcagaaagtgactgtctttggagatagggtcttcaaagaggtaaagttatattaacaatgaggtcattaaggtgggccctactccttatgactgatgtttttatgaggggagaaaattaggacagagacacatattagagaggaaagactgtgaaaacacagagagaaggccatttacaagccaaggggagagactccaggagggaataaccctgctaacaccttgagttcagacttcaagccacaagaacttgagaaaataaacttctgttgtttatgtccctcagtctttggtactttgctatggcaaccttggcagagtcatatagaacatagtcactaagtaagaagataagaatgactggaatttgctaataatgcaaactataaggtctatatgaaagcagaactatcattcacaaaactgggaggacttcaccattacccatttttcaagacttaatcttttttctttctcagtcttgtgactgcttctcttccatttggcctgattgttcttttgcaatgtctctccttcttcaaaagtttgaggtttgaatatgcaacagctgattctggacaccaagggtttttaaaatcttgatgatgaaaaaaccagaaagccttaccactctgagcttataaactgcgtttgagatttttgaggttgacgcttgaatttaccttcagagaaggcaagtttatagtgttcagataatcactttaatgggctttcaattatgaaatgttcaagcaaagttcccaatctgggatgctgactctccagacaccctggctccaataaactaaactatgctaccaaatgatataagagactgactcttcattcattgtgtctgtatatcaagatcccacttagaaatgtttcttttctaaatatggttttagactgcactttttctaattatatttattatttcttggcaaatgcattttgtttgtggtctggttcaagcatttgaacaaaggatattaagagcaaagatgctgtgttatatgtggattcatgctctctgagagaccataaagaagaaccaactgggatttctgaattctactccacaatctacaattcaagattcatgcctgctgttatttttatatggaataactcagacatggacaaatgtggtgacatagaattcatatgttcagatagattatgctcatgaagcctaaggcagatccagcctctgtatgcagagaacatggttttctataagtgtgctggaattctcaagtccagtcgtctaggaaagcatactgtcctggggaggaaatgaacactagggaggaacttagacttgacaagggaggtgtacaattttctcttccccctggagagttcgggtactgagtttcaggtgggagagactcaaaaatatgccctggggaacaataagatggcttttgtaataaagagagcccaaactgggtcatagaagggcttgtgtagcacagggcggacataatttgcccttgttccaagttgtctatgtggtagttctgtttccataggctcatatttactgagttacactcctgattctagaaaggggattgtgctgtcaaatagtattatatgcacctaattgccaaagtccatccatgaacagattttcctgaataattgaacagagaccactgaccataagagacaatatgaattggagaacacatgtaatgaaatcagattctagtttggttttgaagtataaatatatttttaaccttgaactaagaatcttgtactatctatacttccattcctaaataagtgtcttgaataagatgatctttacagtcaactatcagcagctaaattttctggtttagtacatctcactgaaatatccgagtcatcatttttgaacctcagatattgcagtgagttgtaaatgttaagagaggatcatatagttttaattctgggtctaattaaaactatatgatcctctcttaacatttgcaactcagtacaatatctgaggttcaatgtaagattaggagttttcagtacttacggacctcagggggtacacttcatgcctaaaatccacgtacgcaaaggtcagggagcacaggcaaaaggagagagagtgtggggcaactagcagtctagatgggggaatggggtgtgggtcaccttaagtttgaatgcaggatctgaatggtccattaaaaggaagtggtgggaaattgggaagcccagtccaccaggcaggagagatgtctctaagttcctatctctggacacctgctcaagcgatttgagtgtagtatagaactgaaaactttgtcaagggtgactgagtcctgtctctgttacaagaaggctaaataaacttgcatttaaaacagatgctgaggcaatataatattatgagctttcactacaactaggtataacttaggtactaaagtgactgaaagtattggtgcaagttctaaaactgagcactacttctttgtggtcaccattgaagtcatgttggtcttaacaccaggaacccgaaaaaatggaattccaaaccttcattttaaaagtaggggaatcaggtcaatggcgtgtttttcttgacacccatggttctaaaggaccccgttacctcctggaccttcctaatcagcagtaatgttaaaaagttgcaaagagatcgtctgtgcatcatatctgccttccaaccttgagtgaaatcccatgattgattaggtaactaattctctcctagtgccaaagcttcaaagaagcctcagaaagagttttacttttctaacttctccaaatgaaagatgcagtgcaggttgagggccaatccaaatatcaacaacaaaccaaaaaaatcaaaacattcataatcagcattgttttaatcaaagaaaacacttcagaaaaaaaaagtcacaaaacaacattcttcaaatcaaaatatttgatttaatgaaaatattagtgacaagaaacattcaaagaatgtgaagttcactcaactgaaatagtttacaatgtcttttggcttttttactagctttagagagactgaattttttataaaaaataactctaggaacaaatctcaatttcttattaagttacctgtcatattgatccaaaatctgtaaagatattgaggagttggcttttttaaatattaaaaaaagaggattccatggaaatttttccctttaaagtttataacaattgtctatgttttgtcattaatttatttattacttgaaaatattaaaacacttttatgatgtattagtctggtctcatgctgctaataaaaacatacccaagactgggtaatttataaaagaaagaggtttaaaagaatcacagttccatatggctggggaggcctcacaaaaatggtggaaagtgaaggaagagcaaaggcatgtcttacatgacagacaagagggtcatgtgcaggggaactcccttttataaaaccattaaatctcatgagacttattcactatcaggagaacagcatggggaaaacctggccccatgattcaattaccccctactgggtccctcccatgatatgtggggattattacattcaaggtgagatttgggtggggtcacagagccaaaccatgttatatgaattaaaggaaattctttctggttttccaatgtagttagccctccatatatgtgaggatttgttctaggaccactgaatattcccaaatttgtggatgctcaagtcccttagttggcccttcatatctgcagtttctgcctccaaggattcaaccaacagcagatgaaacatgcagtaattcatgacatattttcaaacacagaagctctagaaaactaaatttttgttaattgaaactgagaatgtagaaggccgacttaatttatttgctttacgaaacattagtatattgttagtgatttaaatcagtttcctgcaaatctttcaggtgagtaacacagtttcattgctgaatactcttacgtgctacattttaagagcctcttgtgttatacattttgtgttagtccattttggattgctttaaaggaatatctgagactgaatactttataaagaaaagaggtttattttggctcaggattctgcaggctatacatgcatggttccagcatctgtacctattctggtgaaacctcagacagcttttactcatggcagaaggtaaagggggacccaatgtgtcacactgagagagagcaagagaaaaggaggtgccagtctctttttaacaaccaactcttttgtgagctaatagagtgagaactcactcattaccacaaggatggcaccaagcccttcatgagggatctgtcccaatgacccaaacacctcccactgggtcccactttcaacactcaggttcacatttcaacatatttggtggggacaaacatccaaactacatcacttttgatgatccatcataaaatcttatatatacatatttaaatataatcatatcttaaatatcagtatatgctctgaaattttgacagaatgttatgtatttgtttcttttgaaattactatttgaactataagtgagttccatttaatttgtttggtatttacttccccaagattatcatataatctcgagagttcatgtagaatcaaatacaatctcatttttaaatactataaatccatttttacttttagcttcataattaaccaatttcttatgttataaatatagatatttaattaaagttgtgttcatttcaatcttctgatggtgtgtaatcaattggggcttgttttgttttgtttttgatcatctcaagtattcctgtaggctcctgaaaagcgttatggagctgttcactaaggttacggtgccaaccaaaacagcctgattttaaaagtggtttgaaatgcctagcccctgagaatgcttcccagcacacatggctgctggtgtcttcgttttcctcttcattttgtctttttcccacccagagaataaatatattagttatgcctgtattatggtccatagtttgcatacattaatcatcttgtataaccatctctccccaaaagatagtgtattacatattgtattcatattccagggatgctgtcacaaagtatcacaaatgatgtggccaaaacaacagaaatttattatctcacatttctgtaggctaaaagtctgaaatcaaaatatctgaagagctggttccttctgaaggctgtgagaatcttttccatgcttctcaccagcttagcttccagtggcttgctggcaatctttagcatcttggcttttgctgtatcaccctgatctctgccttcaccttcacatggtgttctccctgtgtttatgtgcctgtgtccaagtcttccttttccaggacatcagttatgttggactagagacccaccctactacagtatgatttcatcttaactaattgcatctgcaacgactattttcaaataaggtcacattctgaagtaatgggagttaggacttcagcatacaaattttaagagggatacaattcaacccccagcacatacattggattctcattttttaaaattaatggcctctgtacaatgaatgtttatttcaatctagtaactcaggaaaaaggcctctttcaatgtcagtattagcaataggtagcataaaataaccagtgtactctgtttggcatcctttgctaagatttttctcctcaagccaatatcttgtgtctggtggatttgggaggcagaagggatacaatatctcatcttcttttgtaccaaagcgtattcatatttctgcttgttttattctatatttttcatgctctttgacattagaacattatttcttcttcttcttcttttttttttttttttctgtgtcttgttctttctctgaagcttttccaccactaggaatgttgtacattaacatgggaaagcccaaattaaaggaagctagtggtttggcagtttaaaatagtttagaaatagttttgctaaaatttatttccactgtcatgttttaacttgttttaatagactgaatatatcattttattagttgtagagcagcctgtgaatatttacctgtcggttaggtgcatctattacagggaacacagaggagagattctttaactttagggcgctgttcatttgctgagagtgggttggttaaaacccaagtttggctcacgttagtggaaagtcactcagtggtaagagggggagaagggtgttcctatttccttatctgtgtaatgagtatttagtttccgtggtcattgtaagctcacatcgataacaattctgttgtaccagagttctactttttatccagccttctggcagctgtcctttcattttgctttcttaaatggcacattgacatgctgattttggttttgggtgggcctaggttaaaatgggagcttggtaactctatcacttgtgttgcttaaaacttttgcagtttcaatttcctcaagcaccaagtggagatactaggatttatcctaccattttatagcagggaggattaaaactaagtaagatggcatatggaaaatataaagagcggtgcctaatttccacttatttgagaaaaataattcatcttgagatatttgataatttctttctttctcattaaaatttggctattttgccatattttatcgtgtattagtattgttttaatttttgtgagtacatataaggtatacatatttatggggttcatgagacattctggtcaggcatgaaatgcatagtaatcatatcatggaaaattggatatccatcccctcaggcatttatcctttgtgttacaaacaattcagttatactcttttagtcattttcaaacgcacatttaaaagattactgactatagtcccctattgtactatgaaataccaggtcttactcaatctttctaactattttttgtacccattaaccattccatctcccccaacttctgcattaccctaaccagcttctggtaaacatttttctgtaatctatctccatgaattcaattgttttgatatttagcacacacaaataaatgataacatgggatgtttgtctttctgtgtctggcttatttcacttaacatgatgatctcgagttccatccctgttgtaacagatgacaggatctcattcctttttatggataaatagtactccactgtgtatatgtaccacattttctttatccattcatctgttgatggacacttaggttgcttccaaatcttggctatcatgaacagtattgtaacaaacatgggagtgcagacatctcttcaatataatcattttctttcttgtgggtacatccccagcagtgggactgctggatcatatgttggctctacttttaggttttatgaggaacctccaaactcttctccacagtggttgtacaacttacatttccaccaacagtgtattagggtttcctttcccccttatcctcacctgcatttgttattgcctgacttatgtataagagccattttaactatggtgagctgatatcccattgtagttttgatctgcatttctctgatgatcaatgatgttgaacattttttatatgcctgttttccatttgtaggtcttcttttgagaaatgtctattcaaacctttttttccattttttaatcaaattattagctttttttctatagagtagtttgagctccttatatattctagttatcaatcgcttgccaagtgggtagtttgcaaaggttttctccagttatgtggattgtctcttcacattgttgattgtttcctttgcagtgcagaagctttttaacttgatgtgatcccatttgtccattttggctctgattgcctgtgcttgtagggtattgctcaagaaattttggcccaggacaatgtgttggagagtttccccatttttttttttttgtagtagtttcatagtttgaggtcttggacttaaatctttaatgcacttatatttgatttttaaataaggcaagagataaaaatcaagtttcattctactgcatatggatattcagttttccctgcaccattcgttgaagaggctgtctttttcccaatatatgttcttggctcctttgtcacaaatgagtttactgtagatgtgtggatttatttctcagttctctgttgtgttccaattggtctatgtgtctgttttatgccagtaccatgctgctttcattacgatagctctgtagcagaatttgaagtcaggtaatgtgattcctccagttttgttcttttcactcaggataactttggctattctgtgtctctcatgattccatgtaaatttcagaatttttaaaacaatttatgcagaatatcattggtgttttgagggggttgcattgaatgtgtagattgctataggtagtatgcacattttaacaatatggattcttccaacccatgaacgtgaaatctctctccatttttttgtgtgtcctctttaatttctttactcactatttcattgctttcattgtagagattttcacttgtttagttaagctaattcctaagtatttaattttattttggctattttaaatgagattacttttatatttctttttcagattgttccctgctgtcatatagaaatgctactaatttttgtatgttgatttttttatcctgcaacattactaaatttatcagttgtagtcatttatttgtggagtcttcaggtttttccaaaaataagattatatcatcagcaagtaaggatagtttgacttcttcctttctaatttggatgccctttatttctttctcttgtttggttgctctagctaagactttcagtactacgttgaataatagtgatgaaagtgggcatagtcgtcgggttccagatcctagaggaaagaatttcagttcttccccattcagcatgataattcttgtgtttgttttagatttccaatccaagttccgttcacagtgtggaattttttcttctgttatgctattgattatcatttttgatgtgtattctgtttctatcttttaaattacttattgtttgcagattatttctttgtgatatatttttctatatagcaaatggtctcctttgtttcaattattttcttctgctctgtgacaggatgtgtctagtctttcttctatttaatttgtgtttttctcaatgttatttgctctatgtattgcttctgaaggtgattttattgggcatgcttggttgactttctggcagctattccactaccccccattatgtagtagccataaggtttgtatatttgattgattcttcttttagttccagggatggaatccgagtgatcgctaaggcaattcatatattttacccaccttaggataactggtttaggattggacaaacaatctcagctgcttcaatcagactcactgtaagtagtgaaatggaaaactctttcctcttccgggcactgttaaagatttttttttttcatgtaaactatgcaactacttcagttattttacttggagaaaacttaagctgagaacaaattctacttgacaaggtgagaaatactgagagagaaattgggaaaccaaacagaagccctgatcaagccttccttgaagtacaacttaactgaaatttccagtcaaagtattttcttcataaggtcaattactttgaattagattttattcatttaaaacttgcaacgttttaacctattcacttttctgtgctgtctctaccatttatttccactgacttcttgtctttatatgttataattataatatattcttttatctaagtaaaaacagatgatagtcatttcctaaatctaaacatttcctatgaaaaatctttgggataaaattgcacatttcctttcactcttttatagcattttcataattgtgtaatatttcaaccattttctttttattcatatttacaaaaggttaacaagaggtttttatcatgcttgctcatggcaaggggcctctactcggcccactgcactcaaccctttgcaaaagggagcacgtgagcaagtgagtatgggatctggccagccgttccaggtactgacacagtatcatgctctgtgcagggcccgtggccagaccaggagtgtcaccctgaggggaacatggtggctcccaagtgaggatgcccatgaccccaaagccccagagcgggtgttacagttctctattagttccactgttcgtggatagtggtgtgttggcagctcagttggccccttgccttgtcacatggggtgactgatctctgctggcaaaagcaaagggctggtgtgacagtgtttctcagtacctgtgctatgtgggttctgagctattgtctggcatccaagaagaatgaggtcacatggacggttgaaggatggtgaaggtggagaattttactgaacaattaaaatggctctcagtggagagggttgctggagaggagactggaagggcaggtagtcttccccatagttaagttgtctcttccctgaagtagggttgtttccccatctactgactgagtctggggtctttataggcacagtctggggagtgcatgctgattggtttgtgagtatgcaaaataggttaaagcaaacacaccactcaaaggtgggcataacagtgtagaaaaccaattaggaaagagtaggtatatgtaaaataggtaaagggtgggaatcaatcagagaaaagcacgccaaatgggagaacaagttctaaatctggtctgaggattaaacttgtagcttggctttcaggctttggcttggaggtgggctgttgctgtgtactcgcccctatctgcctaggcacttggctgcctcctgtcactgtcaatgggttacaattatgccattttccacttgattcttggactacttttgaaattgtatgttttcatatctttggggtttgttgccttttatttgctttgaaggataaaaatattttaagacttttctatttattatttgtatcccttaattatagaaagtctctgttgatattgattctttgtctttcaagtgttgtaaattttttcttcacttatgttttcaactgaaattgtattagttaactttttttgcatattgtaatgtttttcttaaatttgtaactttataacatattttactttgtcgactagaatttatagctagagtttatttgtcataactgggtacttctttttgtattaaataaggcttttattctaaagccacttcaaatacaaaggaataaaactattcttattgaaataatttataaatgttatattcactgagaagtcaaatgcaataatgattgtgaattcaatgccacatgtgatgttttacttgtgttctctacaaaaagctcagtttttttatacatgtaaatatggattattcaagtgctataaaagtcacttgcttttgtgtactctcgagtcattaaagtttttaagagtatttaaaatcctttaccttcttcactttagatgattataaaatttaaacttttagaagtaaggtttggttaggcaacccaaaaatttcaatggcttcacaagacaaatggttattttttgctagagcagtagtcgaacagacatctgattattggcattagacagctctcctgggcatcttttctcccagtggcaatttagggtttgagcctctttgatcctttggctgacttgttctttgtctgtgtagtcctttcattcagatggaagatgggaaaacacaatgctatagactttggaatattgtatgggctcgtaatcagcgtactgaatttcaagccattccttggccactcaatggccactactaaatcacacaacccacccaactggagaattaaatcaaatatctggagcaatttaatgtgcatgcattcgtggccacaaaaatgaagatacaaataagtaggtgattaatttttattaaaatctgatgattttctatagaaataaattcaaatctattaagtatataacttcaggctagtgtcataatgcattcaatttttgtctgcaaaatctgctcgtgcacatctttgttcaaagaaccacttgctacttagtgaccttaactgaaacattaattgttttgtgtgcccaaatttaatagaacctggctatcagggatgatgtcacaaagaacattgttattgaaatgccaggagtttgttctaggtcctgctgttcactaaacaaaaagccaatcactgagacaatgagtattgccagggaagaagcctttaattgggtgctgcggcctgggagatgggagatcagtctccaatccatctccctggccaactaaaattagggatttatgtgacaggaagaaaagtaaccatgtataggaaaacaggaattagggaggggtaatgaagcagagttcatcaataggaagcagatggttggttagttaataatggcaggcgagggatataacatctcattgtccagctgtgttgatctggtaagtttcaattccttgatgctatctgggaggtttggtggctggtttcttgataaagaaactcacataagacaaatgtaactttctcaagtttcaagatgggacagtaaatttctatgtttattcaaaagaaaccataaacaccagttctatgggacaattgggtaggtttcaccatgactcatggaaattagtattagagacattttgaatattagtcacaataaaatagtagttaatatttaagaagctgtgctaaattctttacattcaatcaaattgtttaagatataaaatatctgtacatttatatccatatacataattatatttctatccatctatctacctatgaagataaatgaataaagtgatcatatccttttattttagtctctgatcatcctaacacaatctacccattaaactcaatctgattcccaacctctgccgacttgtttatcctcagctgaaccattggactctcatttataggcttagttctctttcatccttatgacaaatgctctggccattcagtagtaagatgaggagctcaaatttaccccttgatatttacaataatgttgccttaactttgtgctatattctaattctgcactaatgcctattcctagaaatatgggctggacttcacacctcacttcagttgactggtattctgttttacactttgagtctcagtcctggtttataacctccctgctttttattttattctaaacaaggggtgacatcttactatttctgggttcctcttagtactaattccctaatcctatacttccatctgatggctaggaccttgacaccctatgataatcatttctgctatgatcttcctatgtcaaaacgcaacttaaagttgtcatggttcatcagactagtgtttccctaaattggaccttactgatgcctactaaagtcagctaccctgagagctacttgtggtcttaaatttctaactaataaactatatcaggctcttgtccttcaggcctttccctaatcccaggtcctgcctaattctaaactttttcacccaccattttactcagttctcctcttcttgctagggccatatgcaggattgtgccaggtctcaggtaaaaattttgtgtgtgtgtgtgtgtgtgtgtgtgtatgtgtgcatattcatgtgtgcatatctatgagcatgtgtgtatgtgtttactatgtttgataatgaaccattatgcaagagacattaattttgttgctttggctcacttcatatatttattttaattgcatgctcacttgaaacagcttaactttctttggttgatttttaaattaaattatattttattggttgcaatcactgttatcttcccttgtttgtttatggtattaatgtcgggccttcaaagaactgtggaaatactaattatagtttgagcatgcagattgggccatccatgcaattgtttatttcctcaaacattaatttactactgtgtagaaaggtgccaaaatattctgaacccagactaaatggctgcatagcatcttgtgggcttcactttggaaagcacggcaggatcaaagagccaaaatatctgatttctttcatgtgttatagctcatctctaatgacagagtggagacttgtcaatattgcttctattgcccattttgagtgaactgatcaaacatttcaggctcaatatggtcctgctagagatcttactctaggaatgctagaagaataaacattacacttctgaaaattttacaaatgtttgtcaaagattttgtgctaaaactgaggatatacttacttgtttttggtttactgctcagtataattattatttataatttatatcttcatatcacctgtttggtaaaactccaagcatgtgtctctaacctttgtcaaataaaactgaactttccccactttcacttaacaaaataaatctacatgatctctgtttatgtctttaaccctagatcctactacactattctcttcatctctattgtttctttcttttttattttattttatttttgagagagagttttgctctgttgcccaggctggagtgcaatggtgcgatctcagctcattgcaacctccacctcccaggttcaagcaattctcctgcctcagcatcctgagtagctggaattacaggagccccccactatgccttgatatatatatattttttgtatttttagtagacacagggttttaccacgttggccaggctgatctctaactcctgacctaaggtgatccgcctgccttgcctcccaaagtggtgggattacaggtgtgagccactgcgcctggactctgtattgtttcttgattgtctctcttgaatactctccctcacagaataggaacaactgttttggacccctcctcttagatatctcttcttgttttaattgctcattttattaaaaaatagttttagtcaacattctcattataattttcaataatacatacttgggttttaaaatgttgttatacatcttccacagtagaccaaaacgctcataagagcaagtccgttggtagagcaagtccattttttaatcacataatcactctatcctgaataatatcagcatataattatataccagtgtcttaaacagtagaatatctgagcatattttagatataataaacgtattcctcagccagagtccacctaaagataaaagtacccaaattccttccttccctccactatctactcatgtccctgtaactattcctgtcttccacatgaccctccatgataaactattaagacttccaatcaatcgctgaaatcacctgctggtaacgttcactggctgaacccaaccagatgccagagaacaagagagcgactgatttaccttttttttttttttttttttttttttttgcatttttcagtgctttatttacatcacacacaataagttgtgtatatttctcagagagaaaagtcatggtgagttagacgatacttctcaaattttgatgtgaacaataaactagattaatttgtcctgcagagatttttttcaggagatctggaataaagtctgagtttctaaatttctagcaagcttaccaataacaccatgttttgggctcaagaagaatattgtgccaaacatcgaataagtggaagagcctgggtttttcccagtttttctgacccgtaaacaaagacgagagccttcatttccaaagacagatatgtgcaaagaaaatttaagtaggaagggaagcttccagattaaaggtgacagtttatgcacattatctggtaaatctccctaagatacttaataaagaagagaaaaacaattaaccctataatagaaaaatctgtcagaaagctctatggctgagtaaatttaacatcaactgtactaggacaaatctttatcatgtgctgatttacacagaaaaacacaacatcactgctctgatattggtcccccaaaaagtaaattataaactaaatttaattataaagaaacatcagttctatgcaaagttcaaaatacagatgtctcccgtgttctgtaaattgtttaacttttattttaagttcaaaggtacatatgcaggatgtacaggtattttacataggtaaacctgtgtcatggtggttggttgcaaagattatttcatcacccaggcattacacctagtatccattagtaatttttcccccttctctccctcctcccatcctctgccctccgatatgccccagtgtgtgttattcccctgtatgtgtccatgtgttctcatcatttagctcccacttataactgagaacggcagtatttggtattctgtttctgcattagtttgctatggataatggcttccagctccatccatgttcctgtaaacgacattatctcatcatattttatggctgcatagtagtccgtggtaccatattttctttatccagtctatcattgatgggtatttggattgattgatgtctttgttattgtgaataatgctacaataaacatatgtgtgcatgagtctttataatagaacaatttgtattcctttgggtatctactcaacaatgggattgttgggttgaatggtagttcagtctttaaggactcaccacactcttccacaatgattgaactaatttacactcccaccaacagtgtaaaacaattcctttttctccacaacctaaccagcatctgttattctttgactttttaaataatagccattcttttgtgagatagtatctcattgtgattttgatttgcatttctctaatgatcagttattttgagcttttctcatgattgtttgccgcatgtggatctttttttgagaaatgtctgtttatgtcccttgccctcattttaatggaattgttttttttcttccttgtaaattggtttaaattccttataggtgctggatattagaccttcgtcagacacatagaccagtggaacagaatagagaacccagaaattagatcactcatcttcaaccatccaatcttcgacaaacctgacaaaaagcaatggggaaaggactccctgttcaataaatggtgctgggagaaatggctggccatattgtgtctagaatttattccttccagtgggttcttggtctcgctggcttcaagaatggagccgcagacctttgcagtgagtgttacagctcataaaggtgttgcagacccaaagagtgagcagcagcaagatttactgtgaagagcgaaagaacaaagcttccacagcatggaagggcactttccgctgctggctcaggtggccagcttttattcccttatttggccccacccacatcctgctgactggtccattttacagagccctgattggtccattttacagagtgctgattggtgtgtttacaatcctttatctagacactgagcactgattggtgcgtttttacagagggctgatcagtgcgtttattttcctttagctagacacagagcgctgattggtgcgtttttacagagtgctgattggtgcattgacaatcctttagctagacacagagtgctgattggtgcatttttacagagtgctgattggtgcatttacaatccttgagctagacacagagcgctgattgcgtttacaatcctctagctagatagaaaagttctccaagtccccacttgacccaggaagtccagctggcttcacttctcaatatgtagaaaattgaaactggaccccttccttacaccacatacaaatattaaatcaaaagagattaaaaacctaaatgtaaaactcaaaactaagaaaaccttgaaagacagctgaggcaataccattcgggacataggccatgagcaaagatttcatgagaaaaatgccaaaggcaactgcaagaaaacaaaaaattgacaaatgggacctaactaaactgaagaactctgcacagcaaaagaaactgtctgcagagtaaacagaccacctacagaatgggagaaaatgtttgcactgatttactttcacaaagtcagtttgtgaaagaaaaagagaacaagtggaatttgaaaggcaatggctaatttcttatgcatcagtgaagacattggaatccaatagagttgagtgcaaaggtgagcacactgctttcttgctgtgtaactttgaataattaacataaacgtttaagtagattttcttataccagtactcatcacttaggattgtgatcaggatggaagtattatggtctaaaagttccacatacaacaatacctggcatataatatttaacaagtgataatatacttatcttctcatttgaatgaataacttttaaccttgaaatataaaggaatttgctaggtcacactgactaattacaaaggttaaattgattaaagtttctgtacttaggtttgcctgataaaatatttaaaaactatgtattttggtttaataagcctggctactgtagctgtacttcagagaattttataaaatgtttcagaaagaagaatgaatttttatgttaccaaatccatacatacaacactaggcactgggtgactgcctccatcacaatgcttagaatatattatcccataatcagagttcttttatataaggatgataggaaaataattgacaaatgcatttaaatcaatctaaaaatgttggaggaataagaattcactaagtttatatcaatgcttatagaatgaaaatcaaccattataaaagcatttatttgttgtatcttttattttaaaagcaattcattatagctagacctaactaataagcaaactatgttgcaactaggatcagaatcaacattgagcctagtcagtgaaaaggcacatgaaaattaaatttatcaagaaaaagtttgctttgcaatgtactacataactgtgttcaacttagaaaatcatttgtaagaaacagcagatatttgcctcgacttcagaatatgatccttaaaaatgaaatctgaaacattttacattgcatccttgatttctgaaataaatataattcaggatacaactgtcttcccataagaattactttcttaactttaaccataaattaaagtgaccaaagattgtatgaatcgtatagcatcgagataatgaataaaatcttcaactctaagttgcaagaagatgcaaaatattttttttcctctaaggagaagctgatcacttaccttctggcttcttcttaatatattcacatatattaattagcatcaattttgaaaatcaaagtaaatatttatttactatgtggatgatgggaatatgaaaaccacaaaggctcaccattactctggccaatattcttatagtcaataaacatatttccttgagaaaactacaatggttacccctattcaaggaggaactatagaattttgagatataatggaagttgtagagtagtatttcattgagtaaagatctcttcaaggggcaataataagagaagcttataacatacaaaataatgatgatgtagcaactgagaaaactcctttaatactctgatatttcttccccccttcctccctgctgctcttctcatttcttcatttttcatgcatcattcttacattctccttctgcatctgccttcttttctcttcctctgtggttctgcatgatgtttctattttccctctttatatggcttacgtatgttttggatgtctcttctttctgttcacatcacgtgtatttgattttcaaagccaaatccaaatagtagtatcctttttcttctaaattgaaatagtgcttacatgtcctgaccatttcaacccaccttttacattatcatatacctatcagaggcatatatcaggctctccatcaacttagacatttttgtgtatacattctacagctataggtatgcaaacacttcaaaaatataactaatcattgaattctgcacaacccttaagcacttatattgattaaaataaatttttgaataaacagttttgttccgaactacaatttacaagtttcagagattgcaattaattttgcaattaaattactcttgatttacacttacttttattatttattacattgatacattaggcttgcacacatttatggggtacatatgaaattttgttacatgtgtagaatatgtaatgaccaaggcaggatatttagggtatccatcagtcttagtatttacaattgctatgtttttgaaagatttcatgtcctctcttcttggtattttgaaacatacaattcactgttcatgtataaactatagtcagggtatttacttgcctgtgtgtacttgtctggtttttgtatcaggataacgctgacctcagagaataagctagaaagaattttctcctcttcagttttttgtaatagtttgagtataattggtattgatttttatacgtttggtagaatttgacagtgaagccatctgcttggggcttttctttcttgggagactttttattactgattcaatcttgctacttgttattggtctgttcagcttttctatttcttcttgaatcaatctgagtaggttgtgtatgtactggaatttatccatttgctctgggttgttcagtcttttttaacacgtagttattcataacagtctccagtgatcttttgcatttctgtggtatcagttgtaatgtcccggttagtatttctgattttgtttatttgggtcttatatcttttttgattggttagtctagctagcagttcattgattttatctcttttaaaagtcaactttttattgcactgatcttttgtattggttttttagtctttatttcatttagttctgctctgatctttattatgtctttccttctactaattgtggttttggttttttcttccttttttagtttcctgaggtgcattgttagattgtttatttgaaatcttcctactttttgatgtaggcatttattgctataaacttcactcttagcactgtttttgctgtatgctataggtttgggcatactgggtttccattttttatatgctttaagaattttttaaaaaaattttcatcttaatttcttctttgacccaacggttgtttaaagcatgtttagtttccatgtatctgtatagttttcaatgttcctcttggcattgatttctagttttattccaatgtggtttgagaaaatacttgatatgattttgattttttaaagtttgttgatacttttatgtggtctaacatatggtttattctggagaatattccatatgctgatgagaggaatgtgtattctgcggttattggctaaaatgtttttgaaatgtctgttaggtctatttggtctatagtactgtttaagtctgatgttttcttgttaatttttgtctaagttatttgtttaatgctgggagtctggtattgaagttcccaattattattgtatcagactctagctctccctttagataggaatatttgctttatttatctgagtgcttcagtgccagttgcatatatgtttaagactgttatagccccttgtggaatgaatcgctttatcattatataataacctttttgtttatttttactgtttttagcttaaagtctgttttatttgatataagtatagcctctctgatatggtttggctctgtgtccccacccaaatatcatcatgaattgtaattcttataatcctgaagtgatgtgggagggacccagtggaaggtaatttaatcatgggggccggttaccctcatactgttctcatgatagtgagttctcacaatacctgatgattttacaaggggctttttcccctttggtttggcacttttccttcctgcatccatgtgaaacaggatgtgttcacttccctttccaccatgatggtaagtttcctgaggcctccccagccctgcagaactgtgagtcaattaaacctcttttctttctaaattacccagtcttgggcagttctttatagcagtgtgagaatggattaatgcactctccgttcatattaatagccttgtgccttaactactattactctacatcatggaccctatggttctgccatgcccccgtgaggaactagggcaacatagatgagctgtgcaactctattgtttttctttactcactctctctttacacatgtattctatgcaattcttgtttcctggtttagtaataaatcaaatttcaagtgaaataagtctaattattagtcatgccagctggcagacccaaacattctttgactgagtccagaccagccctttgcaattcattttaactaatagcactgcttcatgttctatttgttttatattacaactaataatatctatgttcattggcttttaattttattataaggaacctcataatttagaaataatttgagaaaaatactaagaagcatatctccaggactaatattttgcaaaagaccaatcctgtaactacaactctctatcagactttcctactttcatgtccaacgtaagttagaaaatagactcacattcaaaattgtcctgtatgtttctattccttttcttcctccagcttcatatttttttctcaacattttaaattttaggtacttaaattctccctcatctttgatcaccatagaattttataaagttggtggatcatagagataatatagtccaagctgaagtccataaatatcctgcatttacatattgaatttttagctttacaatgtctacattaataacagattctatagtttgcttttccattccagttctgctactatcataagaaaatggctttatttcctcatacatacctattattgtaatgacctctaattaatgaagcttctcgtttcccttttagtgatgagaataaagtgatattaatattttcctcatgtatgtttgttatatggcttatcaatttttacaaacttaaatttaaaattatcttaaaagaattgctggtatgcaatcttgtttcttatatgggaatatgaagtgatgattatgaaggacctagctggaaacattcattagttgacatgtaaaatataatttgaatacttagtagaacaaggttttagttagctggccgcagctcaccaggagtataaagttattgctgtggtctgaatgtttgtatcccttcaaaatttctatgttaaaacctaatcaccaatgtgatggtgctaaggagcagcacctttggaaggtgatggggttatgtagagaaagtccccattaatgagactatggtccttatcaaagagaacccaggcactgccttttctttttcactatttaaagacatggggagaaggcactatctatgcaccagaaagagggccctccccagacaccgaatctgcttacaccttggtcttagacttccaagctttcagaactatgagaaatagatttttgttgttataagccacccagtctatggcattttgttatagcaacccaaatagactaaagtagttattataaaataggttgtaagataaatatgaatgtgatacagagtggagtaccccattaacaaaatccaggcaataaacaggagtgaaatatgttattggaaagagaacattagataaacaggcaaaggctgaacatgaaaagagtctgagtttgttcactagcatgtcaattagaagtgcagtaggaaaattgtttaaaatcatgccaacaatataaccaaccagtaactacaagcaagtcctcctcattatttcattcagtcttgcttattccaaagaatcttgggtctgccgtctgctctcatcaagtacatttgcttccagacttgagagtcttagaatttgtaatgcagcctaccatggcagcctgaaagttttctaagccatatcattatgaaagtctgtgcccaaagagtctgttttattaagcacaattactgggcaactaaataatttctaactagtctgagcagtgtaacattgattactaagaataattttaatcttatttacttttgcttctaattcttctatgctatgtgatggttcaagtttgtgaccatgtgaatgaacatgttaaatttgtcacactaaggtataatggggtgtgtgcttaaaggaaattgttttaggtgttcttgtgtagactatacacttttgtgcttatttgttcctcttccatgaaatatatttgtcaagtgggaagaaaattccaatttacataaaacttcattaagcctgggactctaactcaataataaatacggaactgaactgagtactttactctagatgattagttattaagcattagcacatatcagatccatctggagggctcgttaaaatacaaactgctgagattcatcctcagagtttttgattcagtaggtcttgacatgcaattttgcatttctcttaagtttacacagtaaagctaaaattgctggttcaaggcccacacttttataactgttgcactttttgccttttataatatccaagtggcctcttgatgcaatgatagaggcaggagtctgagaaattctaggcagacaggggcaggtccctggcaaaatcccatccctgagtcaaaaagcctgaaacccaatggcccgaagtgagaacttccatccctgtgtacccgctctctcccgattggttctttctgaatagcatatttttaccaattgaatgttgctttttccataaccacctacagcccaccctgccccaattctgtgcctataaagacctcaggctcagccagcagagaggaaaagtggctggatgttgagagaggcagtttgactccagagatggcagctggatgtcggaaagcagcaacttgacttcacaagagagaggcagaggtgacttaatatcagaggagagcaacctgcccttcccatcccctttccatctcccctcttgctgagagccgctctcgtcacgcaataaaattcaccacattcaccatccttcaatttatatttgcgacctcattcctcttgggcaccggacaagaatttgggatgcaccaagtgtggacacccacaaaggctgtcacagtggccctttgccattgccagcagagggcagctgccccatgcaataagccaaagggctggctgagctgataacacactgctttctgtggacggcggcggagctaaaagagtattgtaacatgccctctggggccttggggaaccccacctggatcctgccaagaggcctgcatgaagtttgctcctgccagcactaaagcagccagttttttcctgcactcactcacctgcacacttcctcctgcgatgggtgggacacagtcaacctgagtgagcagagtttgctcatgcaggcacctaaattgctggcaagttcctgagctcattcgcttcaattcccgtactcatttgcatgggtgctccctcccacaaggggttgaacaggacaggttgagtaaatggtgcacccctcttttgagtcccaccaagggtcaagaaaatatcctgcatcactttgtcaacttatgccacttaaaggacatgctgcctactttagacttatttacaagtttgcataatttttagacatagacaacgccgtttatctctgcaattactatcaattctaacctaggaagcaccaagttaatggcaataaaaaaaaaaagaataaacaactgtttccagcaacaaggtgactgtaccagtaattaatttattgccttccagaggcaaattcactattgcctgttctgagaaaaagaatctgggcccttcaaatagctgccagaatgtaaaaacttgccagcagatggtggtggagagatgctggaggtggaagggatttcatcccaggtctggtatgctccctcatcaggctctcacagtggaacacaccttctccaacacctggctcctgttcagcagcacccagagaccatcagcttccttttgcactcctttcagataatttagcagttgagtctctctggaaaaatcaatagctttccatgacaccccagaggatgaatctcctgcctgcccaaaaggcatattttcagcaatttcttccagtacagccccactgcaactactctgccacccagtgagagccacattctcttttcttttttttcttttttttaatttttgatttccaacttttaagctcaagggaacatgttcaggatatagagtgtgcagtttggtacataggtaaacatgtgccttgtggtttgctgcacagatcatcccatcacctaggtattaagcccagcatccattagctgttcttcctgatgctctccctcctcccatgccccaccctccaacaggccctagtctgtgttgttctctccccggcaattcctcaaagacttagaggcagaaataccatttgacccagcaatcccattattgggtatatacccaaaggaatataaatcattcaatcaggaacatatacgcatgtgtacgttcactgcagcactattcacaatagcaaagacatggaatcaacctaaatgtccatcaatgatagactggataaagaaaatatggtacatacacaccatggaatactatgcagtcacaaaaaggaatgagatcatgtcttttgtagggacatggatggggctggaagtcattatcctcagaaaactaatgcaggaacagaaaaaccaaacagtgcatgttctcacttatatgtgggagctgagtgttgagaacacatggacacatggtagtgagccacattcttaccctttccaataaggcttgaatctcatcttggtagggagggagcagtcttactggatgctgtatttcagcaccagggattggagaacactccctcacttttgcatcagctaatcctgtactctataaaattcttttcatttattacaatcctattcctccatacacaaatctcctgttaaaattaataacttttatatcaaacttcctctgttcacattactgtgttggtttctccctcctgattggatcacaactgatacaattgggttaaatactttttcataaaataaattattaaatccattcctttagtgtgtaagtatttagagtttacaaattactgagatttaattctacaaattatacatatttacaatctaggtgaaggcactcaagagatatttaaacatttcccctctaagacatcagtttaaagaaagacagaaagaaagaaagaaagaaagaaagaaagaaagaaagaaagaaagaaagaaagaaagaaagaaaaccctttgctagcacaaaacagtccccaaaaccttactgttggggttgagaaactgatacctcctatggcactttggaatgctgagtactttgaatcaaaggagttgaaagaccatagaagcaacttcagaaccaatgtcactctgacctcctgctcttctgtctcttaccctctttctcctgcaatagtgcaaggaggggctctccctgaactttccttatctgtctaaagattggccctctagaaagaatacacttgtcatgagtgtttttcctgggaatctcatcagccagggaaaagtaaaagtatcacaggggaggaaactgaaagttgacaacatgcccaggcagattttatcacagactatcgcctctttttctgagactgtttattacctgaaagaccttttgtttgcataacaagacaacctttgttcaccctgcattttctcccctcactctcccataacttgtgtcaccaccaaccctagaatccccaggcctgtattcctttcttcagctcaagatgttatatatgtttcaatcatctgcccccttttcaagtctcatattttgtgggactcctatgtgtatgcaaataattaaaatgtttttttctcctgttagtaattatcaaaccttcagaggataaagaaagtttcctttctctatattaataatctctagtcccaacattccattcctcattccccagcattcacacacacatttccatgctgcttttcaacaaaaagttttatttcctgcagtgtagcaaaataacatgattctaagttctcttttataaaatctgttagctattataattccttcactcactttcccctttgtaataaatttttccccatccattaaaataatatgggcttagtagaatgcttaaaaaataaagatccacatgaaaaatttaaagtcatgtataaacatataatttagtgataattagtgttaacattttggctcattttctctttgcctttgtaaaattacattagtcttggatttgtttcttttcctacccctatcacaaaagatgctcctcttcatccatggttactattttagtgtgccctaaaggatatcacagctgatatgtcaggctacagttgtaacttccctaaaattatgaccttcttctatcgttgatgttgtcaccacgtggtaatgaaatcttaggatattataaatagtttggtatttgattctcatatttaataatgaatctagagatttcagggaagaaataaagttgatattgtttggatatttgttccctttaaatgtcatcttgaaatttgatcctcagtgttggaggtggagcttagtgaaaggcatctaggtcatgcagcactcctagcacctccaaggtctgctttttcaaaagagtctggagcctccctttattcactttttccttctctctcaccgtgtgttggtttctctcctttcccttctgccatgagtgaaaactttctgaagccctcatcagaagcagatgctggtaccatgcttgcacagcctgcacgagtgtaagccaaataaacctcttttctttataaattcctcagcctcatagtattcctttacagctatgcaaatggactaagacaagagttgatccccttcaaccacacagaaaaagacttccactttgttgaatttgcttcatttacaaacaaaactctaataataatagtatacagagaattaaagaatacaattgatcatatgcactgacttagaaaaggaatgcacatgggatggcaaaatagagaaggcttcttgtgagtgtgtgggggaggcaggatagggttatctgggtctttaaaaaaacacttgacttaagcagagagggctatgagagggcttaataaaagtacagaggtagaaatacagaagaggtataaaaataacaaatagtcttatgtgattacaacttgacatatgtaatttagcggaagcattttctacttctgaaacaaattatgattaacacttcctgtaataggtttataattatgtaaacctatttaaatcaatcatttgcacaacaaaatgaatgaattaatttgttgcagctgtgtttactgaggcacacatgtaaagcaattttaaatgctgtcaagtaacaatgatttcgtttcatgactcacactaagtgagaaattctgatttttttaagacaaagtttaaaaaatcaaaaacttaaaactcctggaactaaaagcatagaagaaaagcttcatgacataggacatgacaatgtgttctcacatatgacaccaaagcacagggaaagaaagcaaaagtagaaaagggactatatcaaactcaaaaacttttgtgcattgaaggacacacctaacagcctgaaaaggcaacctatggagtaggagaaaatatttgcaaatcatatatatctatacatatatatggatatgatagtaaattgttatacagaaaatataaaaagaacttctataactcaataacaaaaatcaaataacttatttttttaaatgggctaaggacttgaatagatatttctccaaaagtaatacgcaaatggaccacagtcatataaaacaaatatttgacatcataaataattagggaaatgcaagttaaaatcacaagatatcatcttacattcactagtatgactgctatcaaaaaaatgaaacaaaacagaaaataacaaatgttagtgagaatgtggagaaattggaaccctagtacactgttggcgggattgtgcaaccactatgcaaaaattataaaaaattaaaaatagaactaccatattacccaacaattccacatctgggattttaaccaatacttttaaccaaaagtattgaaagaagagtctcaaagagatatttgaacactcatgtttatagaagcactatttaaaacaccaacaagtagaagcagcccaaatatccattgacaagtgaatggatgaaggaaatgtagtatatacacatacaatggaatattattcacccctaaaaaggaaatcttgtcacatactacagcagggataagcctgaatgatatgctaaataaataagccagtcacaataagacaaatactgtatgattcaacttctataaaatggtgattactagggactgaggtgaaaaagttctagatatatgtattacaacaagttgaatatacttaaaactactgaattgcactcttaaaatgattaaaatgaagaaaatacatgtttttaactacaatttaattttttttaaatcacaaatttagtgataggtatgtggctttatagatgttttaatccaaacttcacattttaacaataaaagtactaggaccttagaagatgggtgactggtttcagattatccagtcaagatgaaaatttatgccttccaaattaccacatcttaggtgtcttcatctgctagcttaatcccaggttgttcctggactatctctacatcaagcagtgaaagcttaactcccttcatgttttacgatggataaatatgtgaggtgaaaatcaagaggctagcattgacccaatgtacatcatctatcaaggagacaatgttcgtttgttctttgatgaatctctaagacaacattgtcatgattttgttttcatcacacatttgcattaggtattctcattgcttaaagtctcctggccacatttctaaatgtaaacattcagataatccgggtcattataaccttcagtataaaatccaagatttaaagaatacaaacacttctcggtatatacatctggtatgtgcaacacacacacacatacacacacacacacacaatgactgataggccagctcttcactttaactttatttaatgtcagtttctataaattggttaggaaatgctagtagagtgagataaaggaaattaaaattgtaggtatcatttccacaaagcaggtgccactctcaaagctttgctattccttgatccacccggtcaaggacactgacattatgtggtaaagggagaaaacgtcagggcttgattggaggggaggaaagtagaagacagagtggaatcaggtaggtgttagagataaaaatggtcaaaaagaactagggagctcaaacgaaatcagattcatactgcagagtaaatacttgctttggagtctcttattgtgcactgaatatcgtagtgcaggccgctataacagaggtcatagactgggtgtcttaaaaacagcagaattttatttctcataggtctggagcatggaagtccaagatcaggctgccagcatggccatgttctcctccatggttaagggtctcttctgggctgcagactgccatcttcaaatcttgtatcttcacatggcagaaaaaaagatcaagaaaggtctctgggatcgcttttataaaggcattgatcccattaatgaaggttccactcttatgacctgatgacctcctcaaagcctcacatcgtaataacatcacattggggttacgatctcatcatatgaatttgcaggggagggacaaaaacattatacctataataatggatatatgccagacagagtgctaatagctggtgttactgaaattaaaaagactactaagtccataggatatggaagagtaaagaattctagatcattttggggtccctgttagttttttatatgcagacaaatattagaaacaacaaaaaatagtagtgcatgtgagactacaaagatggacaggacaagttaggagagctttacattttaacattagaaattgagagagaatatcttctttattatgaaataatttggaaattacaattttagtgagcaaagtatttacaagaaggatagtttatgagacaattatcattgagaaagggaagtataacatcaattcaacagctactggagccatggagtctacacaggaggcaaaagagctgcagcaaaggcctcagagcaaaatagaaacagtctctcaaatggatgaaaacaatctagcaaattttcacaagggtaatcagtagatgctccttgccaagagaagggatctttaccatgatgcagaagctctgctgtactgcacatgataacccagcatcagttttactaaatttgtttgttcctggactcaatagaagctgaagaatcatgagtcaccaagtcagtggtagaaatggaggtagcaggatagtgtctcaaatgaacttctagaaccattattcataaatgatatacaatccggaattgctctgctatctttaagatgaacaaagtaaactccatgttcaccactattgcaacaattcattatttcaaatatttgagtgctctattaatgaaggttctccacaaaggcaggacaagtaaaattagcagatgatatagatatagatatatacatacagatagatatagatatagatagatgcacaaaaaattgtttttttagaggaattagcttatatgattatggaggttgagaagtcccatgacaggacatttgcaagctgaaggttttgggatgctagtagtacaactcagttcaagtctgaaagcctcagatccagaggagctggtggtataattccccattagagggtgaaggcctgagaattcagggggccactggagtaactcctaaggcccaaaggctagaggggctggcgttctgatgtagaggcaggagaagaagtctcccagctccaggagaaaaacaatcacccttcttccttttctgttccatgtgggccctcaacattttggatggtgctgcccacattgagggcaggtcttccccactcagtccactccctcacatgccaatctcctaggaacaccctcagacacacccagaaataatactttaccagttctctagttgacatgtaacattaaccaccttgagaacccaacacctatttacacctatttaagtagcaatgggttatcgcagcacgaggctactattgaagttgttcatgactatgtccgtttatgaagtaatttaaaagattttttcagttacttccattaatcgcagcccacataaactttgttaacattattaattactaagaatgttttcctcatgtattattggtacattatagaaaatgtaaacatccccctaggtagaagccatctattttgttagtggtgagaagattatattaataattctttttttaaatttatttcttacattttaagttctgggatacatgtgcagaatgtgcaggattgttatataggcatacacatacaatggtggtttgctgcacccatcaacttatcatctacattaggtatttctcttaatgttgtccctcccctagccctctaccccctgacaggccccactatgtaatactcccctccctgtgtccatgtgttctcattgttcaactcccacttatgagtgagaacatgtggtgtttggttttctgttcttgcgttagtttgctgagaatgatggttcccagcatcatccgtgttcctgcaaaggacatgaactcatctttttatgtcttcatagtattccatggtgtatatgtgccacattttcttcattcagtctatcattgataggcatttgggttagttccaagtctttgctattgtgacagtgctgcaataaacatacatgtgcatgtgtctttatagtagaataattgataatcctttgggtatacaaccagtaatgggattgttgggtcaaatggtatttctggttctagatcccagaggaatcaccagactgtatttcacaatgattggactaatttgcactcccaccaacagtgtaaaagcattcctatttctccacatcctctctagcatctgttgtttgctgactttttaatgatcgccattctaactggcgtgagatggtatctcattgtggttttggtttgcatttctgtaatgaccagtgatgatgaaattttccatatgtttgttggccacataaatgtcttcttttgagaagtgtctgttaatatccttcacccactttctgatggggtcgtttgttttttttcttgtaaatctgtttaagttctttgtagattctggatgttagcccttcgacagacggatagatttcaataattttctcccattctataggttgcctgttcattctgacgatagtttcttttgctgtgcagaagctctttagtttaattagatcccatttgtcaatttttggcttctgttgccattgctttggttttttagtcatgcaacttcagcaaagtctcaggatacaaaatcaatgtgcaaaaatcacaagcattcctgtacaccaataatagacaaacagagagccaaatcatgagtgaactcccattcacaattgctacaaagagaatacaacttacgagggatgtgaaggacctcttcaaggagaactacaaaccattgcacaaggaaataagagaggacacaaacaaacagaaaaacattccatgctcatggataggaagaatcaatattgtgaaaatggccatactgcccaaagtaatttatagattcaatgttatccccatcaaactaccattgactttcttcacagaattagaaaaaactactttaaattttatatggaaccaaaaaagagtctgtatagccaagacaatcctaaacaaaaagaacaaagctggaggcatcgtgctacctgacttcaaactgtactacaaggctacagtaacaaaaacagcatggtactggtaccaaaacagatatacggaccaatggaacagaatagaggcctcagaaataacgccacacattgcaaccatctgatctttgacaaacctgacaaaaacaagcaatggggaaaagattccctatttaataaatggtattgggaaaactggctagccatatgtagaaatctgaaactggaccccttcttcataccttatataaaaattaactcaagatggattaaagacttaaacgtaagatgtaaaaccataaaaaccctagaaggaaacctaggcaataccattcaggacataggcatgggcaaagacttcataattctttaattcatatattaattcatatattaatataattctttaatgcctacataacaatcctgtacattctgcacatgtatcccagaacttaaaatataataaataaattttaaaaaagaattattaatataatcttctcaccactaacaaaatagatggcttctacctagggggatgtttacattttctattatgtatcgtaccaataatacatgagaaaaacatttatagtgacttctttattccctaggcattttaatagtctgtatatggagttgtaaaaaaaaaaaaaaaaaaaaaaaaacctaagccatagtctgctcttgactaggccacagaatagttggcaagacaaatgtgtaaagagatatgcataatgcattgctgtagacttaataaaatgtggggcaacagttgatggaaaacaaaagagggaagtaccttgggagccagaaaaggctacacagaggaagtgacactttaacttggttttggtagaactttctaaaggttgagaaaaagtagaaggacagtacagagacaagactcaggccaggtacaaaaccgggaaaggttctcgggagtgaaaagtctggctgtgtgagcttcaggcagcctgagaactttccatttcatgcacaggaagaaaagcaaaatttccagtgaattaacacaaagtttcttttgatttcttataatgagataaaagttataattacactatacctataccaagcaatgttttttctctctttctctctctctctctttttcttttctttgaatcttgtgaccagaagtctggaacacagagtctatacagaaaaaaatttcactgaagcagctgggtttcaatgcttggtactaaatttccctagtcttacaatactgttgaacataaatttgggcctctccaatattggcaaaagcacatttcatgatgggtgtagacctgtagatgtgggaggatggtatttacctatatcgcctttccatcaagtacattgaatgttggagaccatttaataatttggcaagttagagtcgaggacaagtaaaaagacagcaccagaagtctttgcatattgttatgactaaacaatatgatacttttcttaccttttccttcaaagctacgcatataaataaaagcaatttctgcattaataagccagcccacaataactggaaataccaatagaaaaattgtacacatgctataaaattgaagaaggaaccattaaaattcctccaaaaagcaagatactgatatgcacagttttaatgttttacagtctgatattaatatctgcagaaattatacaaacaatcttttggtaataattgacattataaatagcaatattctcataatctataatgctctttatgtatcaaaaatatagatataatttcatttttatatagcaacgcaactttttaatctttattcagtctcagtttagcatattgtaaaatataatgctacaaaacttcccaagatttatatagttcctttgcaaagagaacattaaaatcaccagatcgaacatgaaaccatcaagaaaacaccattttctaatcagcttcatagtattaggagaattccttgggataaccttggccccaattttaccttttcatctttgtaagaggatacccagcagcatttacagatattcacaagtaaacaagtgtttatctaattgaccatgtttccagctacaattccatcttcattgaaagagaaaaaacctcttcctgagtgtcaaaccctcctttggctcagcatttcttggaaattagaacagacagtttgagatcatgtgtaatgacataagacaatagaactctgtcatttaaaaatctgacccacgggatgacaatctttgaatactgctttggagatttattttctcattagaatctgctttatttttataatttcctacaggaaccattcaggaccgtacaaggttcaaaaggaagggcaaaaaaagaaattcttttggagttttctcctgtgaaagtatctctatgacaccatggttattttaagggacaaattgtaattgtagagaagaacaaggtcatattgaattaaagtaaattattctgaaacaatttcagcatatgataaaatggttttgaagaaatattctcatctgtacgttaatgaaaaacatttaaaaaatctagaacccacattgtgtgagcatgtctattgacagaaggaaattaaaaagaaaatgaaggcttgtgaattagaaaataataatctgagtgattagagttttataccctcaagcagtattcaaacacaagtaaatcaaatctgatgtaggtaagaagttttaggacagatggtaaaaatgagatcacaccgaatgtccatggaaatgttggaattacgaattcttgcctcttttagttccaaagggccagttttcggggatggaagcgaacatatattcatgaaaatcttcaaacaggccatgtttctgtcttaaaagctccagaataaaagatctttgtgtgtgtgtgtgtgtgtgtgtgtgttttttagaataatatgagtccaaggtaggaaggaacatattgtttcatgtaacaataagaatggaaattgatttgtttctcacttcctgaattttcctgaactcatctttatctagtcatctgactcatttccttgcctaaattagaatgaaacttgaacattatttataattttattcaggctaaaattaattctgtggaaaggtcaagtttcctatgacacattcctctttctttgagctggaagttgctatagtcgcatcgcttctcctgaaggaaattagaccagattggcctatcacattttcttctgtggagaagcttaacatgcttaatgcagaaaaagtttaggaagatttaaaaagaaatgctaagtgtaaattgcaaagtcataaatactattaataaatcaatacaaattgaaattgataaaaaatgttatccaaacagcttgataacaaaagtatcaaatctaatactccaaagcaaatatttccctttaaaaatcatagtattgatattcagaagagacctgaatattttttttgaccacagtaagagcagagatacaattgtagtggtagagacagaaaattcttattgatgtttttctgttaaaaagatcctgaaatctaaaatctgttctgatcttattattgccacattgcaaaaactgtaatatgtaaaagatactcactcctaaattgttaaattgaaaatagcaacaccattacaaattagctgggtcagagactaagcttggagtgctccataagttgacttggcaactttcatctcctgaattgagaaactaatctgtgtcatttaagaaattgcttgggaatatttgttcagcaataatcccctcctggttgccacacactccccaaaatgccatgattttatgtataatgagaggctgaaatgatccaagaatcttggatttgtcccaacacctagtgagcttggcctgaaacataagaatgttggatcagaaaagaacctcaaaattgcaactgaatgtcatcttgacttctctgtagcaaggagataattgttaggcaatgtcaaagaaattaaaataaagcaaataaaatattaatgctaaatatataattgactgattatttataaatatcttccagattcattatggcataaagaacatatagccttcccatttggaatatatgacattgtaggatagagagataatataaggaaacagaatactggaagaatagtggtgatatcatcagaaagggtaaaatttgacatggtaaatagtttggaagataaatataatttattcaatttagatttagtgagctcatgctaataaagaggcattttagtggaatattccataggtaagtggaattaccaaactacagcttcagggagtttggaagtagagatatacctttaaaatcttgaagacagatgtagttagttttgccatgcatctctttaggggatagaaagtaaaccagtgaaggactaggcaaacctctggaagcagcagaattgtgagcttatagaagttgaataagcagagtgtgatttcatagagcctaaggagctcacaaaagataaattctgtaactgtgtctcctgagtttgaagcaggtttaagaccataggatttgagaagaaccacgttgaattttgttagtgtgatttccactgaatgttgtgagtagcaaccagacttcaaggcattaaagaggaaataaatgttgccaaaatgactaacagaaatacaccactaatatgagatattctataagaaaacatagctggggaaagataattctgcttttaaaaaagtatttacttgttttattgttttttgatgtagaagaaatctcaacttctttacagacagggataaaaaatctattttcagtatagatttgagaatgtgtcggctaaagaagcaacaatttaatgaacaacaaatattaggcaatgtcttatttcttctccagaaaaaaacaattcttctattccccgtgttttacaggggtgggggtctttatgcttgccagtttctgtagccagatagctattcttcccctgttattcattaatatgctctgtcctacaatctaaatgattcacatactgttcattatagctagcctgttcttcattgctctaaatttcaaggatatttgaccactttcctcatgtacctttagtatttccttgactctgtgcttaaggaggcactatctcatcttttaaaatgcttttaactcttgtgtttcctctaaaatttttgtttctgtgaaatagcatcttccttaaaaagtgtcttttatcttttctgatagaattctatatcagttgattttgctatattttttttggttattgaaaatactaaaaaggacagattgtaatacaacagaacataatacttgcacgtaacttagtaaagccagttacagggaggcaagattaaagtgatagcaatgtttagccattttaatgcaagggttaaaatgtttgcattcaaatcagtgaagaactttactttctttcttaaaattttgaaacacacagctcaaggttttatttcctgacaagtgtttctgtcattctatgccattgcttaattctttgtcattagttgagatcagagccatatgctttgaaaccaaataatcaagtggcagggttcaaattctgttttgaaagctgtcacctgatgtgaaatttggggtaacatttttaacctaattataaagcaaagccagattctataaaaggaaaaagaagaggtaatgatagaggacattaatagattatataataattacacgataatatatatgatataataatcttatataatcattcactaatgtccatatgtactaggtatgtaatccactactattcttgaggtactgggccctgtgattttgatgctcattttttcttcctacttcactggagagagagaggtgatcagctggaatttcctcataagatgctcatagtgtgtgtacctacgtgtatatatattttttatattatatatatgtgtgtgtgtgtatatatatatacacatatgtacacactgagaatatatatatattttatattatacatgtgtgtatatatatacacatatgtacacaaaccatagtatatatatgcattataggctatcagcagttaagtttggggctaatatatatacatagtatctagatatagtgcatatatattctatgtatagtgtgtgtgtatatgtctgtgtacatacatatatatgtgtatatatgtactatgtatagtatatatagtatatatgtgtaaaagtgcatatatatacattctgtgtgtatatatactaaatatagtatatacatatgtatgtacatatacaaatacatatatacacagtacagtatataagtaagtatatatgtataaaaatacatacacagtatacatacaaatatattgtattgcatgagtccacttgtatgtggattttcttccttctctgtcatccctgagagagaaagatcaacccttcctcttcctgctcttccttaacctaatcaacatgaagactataagaatgaaaacctttatgatgattcatttctacttaataaatagcaaatatatttttcttcctttttattttctaaataacattttcttttctctagcttactttattgtaaaagtacgctatagaaaacataatttacaaaatatgtgttaattgtgtatgttattgtattgataagacttctggttaatagtaggctatcagtagttaagtttggggatatcaaaagttatacacaaatcttccactacatgtgtgggagtgttgacacccccaaccctgcattgctcatgggttaatatcttagaatgtttgtgttgctctaaggaaatatctgaaactgggtaacttatatttcaagaaatgttaaaggctgggcgcaatggctcacgcctgttatcccagcactttgggaagcccaggtgggagtatcatgagctcaggagatcgagaccatcatggccaacatggtgaaaccccgtctgtactaaaaaatacaaaaaaaagttagccaggcatgggggtgggcgcctgtcgtccccactactcgggaggctgaggcaggagaatggtgtgaacccagcaggcggagcttgcagtgagccaagatcgcgccactgcactccagcctgggcaacacggtgagactccatctcaagaaaaaaaaaaaaaaaagaaagaaagaaatgctaaaataagtccttcagagaacatggctcataattctgctggctgaaacgttgataatttatctggtgagagcctcaggctgctttcactcatggcagaaggcaaaggggagccagcacgtgcagagatcacacggtaagagaagcaagggagaaggagattccgtggtctttttaataaccagctgctctcatgagaactcattaagtgagaactcagtcacttccttccacctgaaggaagtattaacctattcataagtgatctttccccatgacccaagtacttcccattagaactcacctccaacattgagattaaatgtcaacatgaggtttggggaacaaacatccaacctctagcagtcaactctacatatcttaacttggagagaaaacaaactagggagggcggcgcaagatggctgaatagaagcttatatcattcgtcacccccacaagaataccaaattgttacaactaaatgtgcacaaaagcaccaacacaagaaccaaaaatcaggtgagcaatcacaggacttgattttaacttcactgaaagagacatgaagaagtcaggaaagacagtcatgaagtgtcaattccactccacttcatccccagattctcagcagcctcggagcacagagaatctgtgcacttgggagagagagatagtgcagtgattgtgaggctttgcattgaactcagtgctaccctgtcatagcagaaagcagaaccgggctgtactaagctgacatgcacacacagaggaagcatttggaacagctctggccagaggggagttgcccatctcagaggtcagaacttgagttccaccaaaaagcctcaccgtcattgattggctagtgagctctggggctctaagtaaacttgaggcacagtctaggccacgaagactgcaatttttggcaagtgctagtgctgagttgggctcagagccagtggactgggggagagtcatgtgatctactgagacacgagccaaggcagctaagggagtgcttgccccactccttccacccttgcagcagccacgtggcacagagaaatctgtgcacgtgggtaagcgagagcacagtgcctgggggactatactttgaacttagggctgccttagaatggcgaagacctggcaagattcatcacctgcttactaaagagcacctggcccctaaataattaacagaggtaaccaggtctggggctctgagacatgctggcttcaagtgtgacccagcacactttcagctgcggtggctacagtgcaagtctccttctgtttgagaaaagcaggggaaaaagaggactccgtcatccaccttagataccagcttggccacagcggggtagatcaccaagtaggatcttgggatccctgagtcaaggctcaggctcttggtaatcattgctggacctcttatggaatagaggggagcccactgccctgaagtttgagccccaggcctgggagctttgaccacgagctgacagaagagtccctggactttgagtgaacctcagtggtggcctggcagaaagccccatgggctggtggtggtagtggccataaggagaggatcctctgcttgtgtaaagggaaaagaaaagtgggaaaaactttttctggaggttttcatgccagtttagccacagtagaataaaacactaggtacatttctaaggcttttttattttaatttctggctcccagacaccatctctggacccactcaggggttaggaaaattcatcatcctgaatggggggaaaccaacctggctgactttgccacctgttgaaaatagggccccagagcccccatgtgaccttaaatggtagccagggagtggttacatacagtgagacccagtgctgtgctggcttcaggtctgaaccagctcagtctcggtggtgacaccacagaggttctcatgttctgctatccccagttccaggaggctcagtgtagagtaagggaaaagaacaagagtctctgcctgataatccagagaattcttccggattttatccaagacaagcaaggcagtacttctatgcatctgcaagaaccgcagcattattgggtttgggacccaagtcccttagaatatctggaaagccttcccaggaaagacagttacaaacaagcccagactgcaaaaactacaatgaatacctaactcttcaatgtccagacaatgacaaacatctacaagcaccaacaccatacaggaaagcaggacctcagcaaatgaggtcataggttcattgccccctctgttaacctgttatttacctggtatggaaatagggtgctgctgagcagaaatgagcagtgggaacacttctttcccctcggaaaacaggagaaagaagtgctaacagcatctggggtaaactgcactaaaaaccttgctctaggctggttgcggtggctcacgcctgtaatcccagcactttgggaagacgtttacaacctttaaaacagaggtttcaggccaggcatggtggcttatgcctataatcctagcactttgggaagccgaagtgggcggatcacgaggtcaggagatcgagaccatcctgactaacacggtgaaaccccatctctactaaaaatacaaaaaattagctgggtgtggtggcacgtgcctatagtcctaattattcaggaggctaaggcaggagaattgcttgagcctgggaggtgaaggtttcagtaggccgagattgcaccactgcactccagcctgggcgacagagtgatactccatctcaataaaaacaaaacaaaataaaacagaggtatcaaaatagctacgttgaggaaactcagagaaattcaacataacatagagaagaaattcagaattctggcagataactttagcaaggatattgaaattattacgaagaattgagcagaaattctagagatgaaaatgcatttgacataatgaagaatgcatcaaagtcacttaatagcagaactgatgaagcagaaaaaggaattagtgatcttgaaaacaggctatttgaaaatacagtgagaaaagacaaaagaaaaagatgaaaaacagtaaagttcacatagaagatctagaaaatagccttaaaagggcaaacctaagaatgactggccataaagaggaggtagaaaaagagatatgggcagaaagcttattgagagggataatatcagataacttcccaaacctagagaaagatatcaatatcgatgtaagagataccaagcagatttaacccaaagaagactacctgaaggcatttaataatcaaactcccagacctcaaagataaagaaaggaccgtaaaagcagcaagagaaaagaaacaaataacatacaatggtggtccaaagtccatttggcagcaggcttttcactggaaacttatggcatgatatatttaaagtgctaaagggaaaaacttttatctttgaaaagtacaaccagtgaaaatatcctttaaacattaagaagaaataaagatcttctcagacaatcagcagctgagggatttcatcaccaccagacactgcccataagaactgctaaagggagtacttcaatctgaaagaaatgagcattcatgaacaataagaaataatctgaagataatatacaaaaaatactccacggaatattatagcactataattgtggtgtgtaaaataactttatcttttgttttgtttgttttgtttttgagacagattctcactcactctgttgcccaggctggagtgcagtgacgcacctcgctcgctgtaacctctgcctcccagcttcaaagtattatcctgcctaagcctccctagtagctgggattacaggcctgtgccaccatgcccagctaatttttgtatttttattagagacagggtttaatcatgttggcctggcaggtctcgaacccctgacctcaagtgatccacccacctcagcctcccaaagtgctaggattacaggcatgagctgccatgcctggcctgtaaaatgaccttatcttaagtagaagactaataataaaccaattaaaaataatagctgcacaactttttgagatatacacagtacagtaagacatatagagaaacaacaaaaagttaaaacgcaagcatacaaagttaaagtgtagggtttatattaattttccttcggtttatttcttttatgccatcagtgttaagttgtcaatttaaaataatgggttataagatagtattcacaaggctcatggtaacctcaaattgaaaacatataacagacacaccaaaaataaaaagcaagaaattaaaggataccatcagagaaaatcaccttcactaaaaggaagatgggaaggaagaaaagaagaaagagaaggtcacagagcaaccagaaaataaataacaaaatggcagaagtaaatccttacttatcaagaataacattgaatgtaaatgaactaaaatctcaaatcaaaagacatagagtagctaaatgggtaagaaaaaaaaaaaagcaatgcccaatgatctgttgcatacaagaaacacacttcacttatacagatacacatagactgaaaataaagggatggaaaaagatatgccatgccaatggaaaccaaagaagagcaggagtagctctatgtatattagatgaaatagatttcaagacaaaaatgtaggaagagacaaagaaggtcattatataatgatacataggtaattcaacaagaggatataactattttaaatatatatatgcacctaacgctggagatccacacatataaagcaaatattattataattaaagagagtaacagatctcactacaataatagctagagatatcaataccccactttcagcatttgacagatcttctagactgaaaatcaacaaagaaacattggacttaatctgtactatgaacaaatgaacttaatagacattaacaggacatttcagccaatggctgcagaatacacattcttttcctcagcacatgaattattgtcaaggagagatcatatattaggtcaataaacaagtcttaaaatatttgaaaaaaaaaaatgaaataataccaagcatcttctctgaccacaatggaataaaactagaaatgaataacaaggggaattttaaaaactatatataaacagtggaaattaaacaatatgctcctgaatgactagtgggtcaatgaagaaattaagaagaaaattgaaaaatttctgggaacaaatgacaatgggaacacaacataccaaaacctacgggaaaaagtgaaagcagtactaagagggaaatgtattgctagttataactgcttacatcaaaaaagaaaaaaaaaatcaaataacctaacaatgagttttaaagaactagaaaagcaagagcaaaccaaacaccaaattagtagaatcaatgaaataataaagacgagagcagaaacaaacatatttgaaataaaaaacaatacaaaatttaatgaagtgaaaagttgttttttgaaaatataaataaaactggcaaatctttagtcagactaattaagaaaaagagagagagagagagaagacccaaataaataaaatcagagatgaagaagggggcattataactgacattgcaaaaagtcaaaggaacattagtggctactgttagcaactttgtgcaaacaaattaaaaaacctagatgaaatagataaattcctagaaacatgcaacctaccaggatcaagccatgaagaaattcagaacctgagcagaccaagaacaagtaatgagattgaagccataataaaaaagctcccagtaaagaaaaggccaggatctgataccttcactgctgtattctacaaaagatttaaataactaataccaatgctacccaagctgttccaaaaaatagagggtgaaggaacacttccagtatttcttattctacaaggccactattatcctgatacgaaagccagacaaggacatattaagaaaaaaaattacaagccaatatcactgatgaatatagatgtaaatatcatcagcataatactagcaaactaacttaaacagtacatttaaaaggtcatccatcatgaccagtgagatttatcccagggatgctaagatggttcaacatacacaaatcaatcaatgtgatacatcatatcaatagatggaagaacaaaaagcatatgataatttcaactgatgctgaaaagccatttgataaaattcaacattccttcatgataaaaaaaaaaaactttaaaaactgggtatagaaggatcatatttcaacataattaaagccatatatgatggaacgacagctagtaccattctgaatggtgaaaaactgaaagccttttctctaagatctgtaacatgataaggatgctaactgtcaccattgttattcaatgtagtattggaagtcctagctagagcaatcaaacaagagaaataaataaaggacatccaaattgaactgcaagaagtcaaattatccttatttgcagatgatattatcttacatttggaaaaacctagagactccaccaaaaatctattagaattgataaacatattcagtaaagttgcagagtacaaaatcaatatacaaatgtcagtgacatttttatatgccaacaatgaacaatcagaaaaagaaatgaagaaagtaatctcatttacaatagatacaaataaaataaaagacctaggtattaaccaaagaagtgaaagatctctataatcaaaattacagaacactgatgaaaacaattgaagaggacacaaaaagggaggtattctctgtttatagattgcaagaatcaatatcattaaaatgtccatattacaaagcaatatacagattcaattcaaattcctatcaaaatataaatgacattcttcaaagacatagaaaaaaatggtaaaatttatatggaaactcaaaagacccaagatatcaaaagctatcctgagcaaacagaacaaaactggaggaatcacattacctgactccaaattctactacagagctatagtaaccaaaacagcatggcgttaacataaaaacagacacacaggtgaatggaacagaagagagaacccagaaacaaatccatacacctatggtgaattcatttttaataaatgtgccaagaacattcattggagaaaagacagtctcttcaataaatggtgctgggaaaactgggtatgcatatgtagaaaaatgaaatttgacctctatcacttgccatgtacaaagaacaagtcaaaatggattaaagacttaaaagtgagacctcaaactatgaaactactacaataaatcattggaggaaatatccaggacattggtctgggccaaaatttcttgagaaataccccacaatcacaggcaacgaaagcaaaaatggacaaatgggatcacattcagttaaaaaacattctgcattgcaaagaaaaacgtcaacaaagtgaagagctaacccgcagaatgggaaaaaatatttgcaaattatccatctgacaaaagactaataagcagaatatataagtagctcaaataactctctaggaaaacctaataatcccattaaagcttatttcttgcatatttaatgataaatttaacttacatgaacaaataaagtttaaaccttgcttaataatatggtagtaatgatagtaacatatttgtgagataaaattctatttatttttgtttttatctgataatgtaacattgtatccctatcaggcatgaaatactctgataatttttcatcagactccagatagtacctgtagttctaaccctgacctacaagactgcaagactgtagtcccaggcaacctctcagatctctacgctccctcattcaatgctggccacacaggtcttcgtgtcagaccagcctccacgctgaggcccatcataggtttcaattcctcagccagaaaaatcatccttcagaatcaattacacagttccctctcttcctgagtactctaattctcccctgacctttgctgaaactttccctaaaatttatcccatccttctctactctctgttttatgtcagcatagttgctgtagcattccattctcacactgctatgaagaactacctgagcctgggtaacttaaaatgaaaagaggtttaattggctcatggtttcacaggctgtacaggaagcatggctggggaggcctcaggaaaccttcaaacatggcagaagacaaagggagaccagcacatcctacagagctggagcaggaggaagagggcaaagtaggaggtgctacacagttttaaacaacaagatctcatgagaactcactatatcaagaacaccaaggggaatatccaccctggtaatccaattacctcccaccaggcccctccaccgacattggagattacaatttaacataatatttggcagggacagaaatccaaaccataacagtggctcatcactaactgttcatattctatgtttatttttactctttctcctagtcactgaaatgcaacacacacacacacacacacacacacacacacacaaacacaatctttaaaatcagcttcaaatcagaactctaactgtccagtgagaaaaatgaaatacacaaattagtatcatctcagcatcactctaccacgttgattacactgagattgttttcttttcctcttgtcttcttctcttctcgtctttctttttttctgtgggaccactgtcttcccttagcttctgttacaattcttttaggactctgtgagtgcttctttggcaccgttaaatcttgggatctatgttcaaaagggtccagaatctaataatattacaccatttttcctgctaacattctggtacaaaccactatcatctgtcagctgaataacattaccttaagcatttttccttctgcaatctacgcaaactacagtctatctcaacagaacaggcaatgtaaacttttataaatataagtcagctcaggtaactgtttggctcagaatggcttccctgttcactcaaattaagagcccaaatccttgctacgacctgtgtacttggcctaagtcactgtttattctcagatctcatctgcttttctcctacttgctctgtccactataaacacacatttccaggtattcttcagtctaaggcttctgaacctactgtttttttctccccccaatcttcacattgttagatgtcacacctgcttcagaacttttctcaagtattaccttctcagccagggtttccctaacccttattttaaaaattataacctctcctctcctcctgacactaagtactctattcccttttcctgctttatttttctttctcacatataccaccttctaacatttactgtatcttacctttttataagaggtaagcttcataaggtaaatttgtgttgtttatagttctagtaccaggacatacaacaaagcctggaatataggaagtgttcaataaatactttttggataaatgaatgaacaaataaatgaatacccagaaacaaggaaattgaagacataagaggaaaagccctctattaaataaaagtttgaactgtacccaaataaatcatacatttattggtgggaaaattggttgctttataattaagtttaatatatcctgtgtattataatcacaattttatttgaaatggtattttaatttaactcaagttgttgtaagctaaatggctcatgtgctcctcattaggagatgaaatttcatcagttttctcaaaagttttgctttccttacctgatccacttagtaatcagttaggcaattaagacaattaattgagaagtgggtaaaaaaatactaacaatatgacttttgtgtgcgtgtgtgtgtgtgtgtgtggtagaaaatcctgattattgacaatggaaaactacctagaaaattaggaaaaatctatctaggcatttacataacagaaagtcatgtcctttttcaagccagtactttacaaggaataccttaaatttatccaaactcatacagtcccaaactaaaagtcatgactcagggttctagtgctgactctactatcgaggtggctgatatagtttgtatgtttgtcatctccagctttcctgttgagatgtgatccccagtgttggaggtgggacctagtgggaggtgtttttgtcatgggggtggatatgccatgaatggcttggtattgtcccttagtaatgagtaaattctccctctatcaatttccatgagatcttgtggttaagagagaggcaccttcttccccttttttgctgtctctcagtatgttacaagcaagcttcgcttggcttccactatgagtaaatgcttcctgaggtcctgaccagaatcagatgttggtgccatgcttcttgtacagcctgcaaaaccataagccaaataaacctctttttcgttataaattacccagcctcaggtatttcttcatagcaaagggaaatgaactaatacagtggccatagccaagtatattgatcagattccatttaactattaataaattgtttgaccaataaattatcagatatataccatgggccagtaaatggatatcttgctatagattgggcattctatacacttaattaagcaaggaccatgctcttcatatgataaattcctacactcaatgtttagtccccttgggcaaaatgagatacagaatataagctgtaataggaagaactacatggtatatgttcacatggactttggagtcaggtgagtcatactgtttgtcccaacttactctcttttaattgtgcaataggaaagtccctttatatttttttgcagaaaattttgttatgtttaaatgtgaataattgtatctatttcatattagtcttttacataataaatatatgcagaacacttatagtgccagagaaaataaatacccaatgtatggtatagctacagccctgatcccattcctcctgagacctcccaaaagggatctccagccatctaatccaggcacattcaggtcagcaacagatcagtacccctctgggacagagagcttccagaggaaggagtaggctgccatatttgccatttcacagccttcactggtgatacctccaggtagggaaaaattcgaggcaactaggctctggagtggaccttcagcaaaccatagcagccttatagaagagtggcctgactgttaaaagaaaaacaaacaaacagaaaacaaaaacagcatcaacaaaaaatactccacaaaaaccctattcaaaggtcagtaacctcaaagatcaaaggtaagtaagtccacaaagatgagaaagaatcaacacaaaacaacaaaaactcaaaaagccagaatgccttttatcctctaaatgcctacaacacctcttcagcaaaaatacagaattgggcagaggctgagatagctgaattgacagaattaggcttctgaaggtgggtaataacaaagttcactgagctaaaggagcatgttgtaatccaatacaaagaagctaagaatcataataaaacaatacaggagcagatagccataatagccagtttaaagagggacataaccaacctgatggagatgaaaaacacaacatgggaaattcacaattcaatcacaagtatcaatagcagattagaacaagcagaggaaagaatctcagagcttgaagaccatctttctgaaataaggcaggcagacaagaataaaggaaaaaagaatgaaaaggaataaacgaaacttctgagatacatggaattatgtaaaacgactgaacctatgactgattggggtacctgaaagagagggaaagaacagaaccaagtgggaaaacatacttcaaaatatcatccagaagaacttccccaacctggcaagacaggctaacattcaaattcacgaaatccaaagaaccccagtaagatactccatgagaagatcaaccccaagagacataatcttcagattctccaaggtcgaaatgaaagaaaaggtattacaggcagccagagagaaagaacaggtcacctataaagggaagctcatcagactaacagcggacctctcagcagaaaccctatgagccagaagagaatgggggccaatattcaacattctttaaaaaaaaaatgtccaaatcagaattcatatccagccaacctaagatgcataaatgaagaaaaaaataagatcctttacaggcaagcaaatactgagggaacttgtcaccatcaagcctgccttgtaagagctcctgaaggaagcacaaaatatggaaaggaaaaaccattaccagccactaaaaaacacactgaagcacacagaccactgacactatgaagcaaccacataaacaagtctgcaaaataaccagctagcatcatgatgacaagatcaaactcacacataacaatattaaccttaaatgggctgaatgctccaatttaaagacactgaatggcaagctggataaagagccagacccatgggtatgctgtcttcaaaagacccatctcatgtgcaaagacacacatgggctcaaaataaagggatagaagcaaattaaccaagcaaatggaaaacagaaaaaaagtaggagttgcagtcctagtttctaacaaaacagactttaaaccaacaaagatcaaaaaagacaaagaacggcattaaataatggtaaaggcttcaattcaacaagaagagctaactatcataaatatatgtgcacctaatacaggaacatgccgattcacaaagcaagttattagagacatacaagagacttagatttccacaaaataatagtgggagactttaacaccccactgacaatattagacagatcattgagagacagaattaacaagtcattcaggacctgaactaaattctggatcaagtggatctgatagatatctacagaactctccaccgcaaaacaacagaatatacatgcttctcattgccacatatcacttactctaaaattgaacacatagtaggaagtaaaatatgcttcagaaaaagcaaaggaactgaaataataacaaacagtctctcagaccacagcacaatcaaattataactcaagattaagaaattcacccaaaaccacatgacaacatggaaagagaacaacctgctcctgaatgacccttgggtaaataatgacattaaggcagaaatcaagaagttatttgaaactaatgataacaataatacaacatacctgtattagtcagggttctctagaggggcagagctaataggattaatgtatatataaaggtgagtttattaaggaacattgactcacatgatcacaaggtgaggtcccacaataggctgtctgtaagctgagaatcaaggaagccagtctgagtcccaaaggtgaagaactttgagtctcatgttcgaagacaggaagcatccacacaggagaaagatgaaggccagaagattaaaccagtctagtcttttcatgttattctgcctgcttttattctggccacactgacagctgattacactgtgcccacccagattgagggtgggtctgtctttccaagtccactgacttaaatgttaaactcctttggcaacatcctcagagacacatccaggaacaatactttgcctctttcaatccaatcaagttaacactcaatattaaccatcactgtaccagaatctctgggatgcagctaaagcagtgttaaaagggaaatttacagcactaaatgcctacatcaaaaagctagaatgatctcaagttaacaacctaacatcacaactaaaaacactagagcccagatgtgatggctcacacctgcaatctcagcacttcgggaggccaaggcgggtggatcatctgaggtcagaagttcgagaccagcctgaccaacatggtgaaagctcatctctagtaaaaatacaaaattagctgggtgtggtggcccatgcctgtaatctcagctacttggggggccgaggcaggagaattgcttgaacccacgaggcggaggttgcaatgagctgagatcatgccattgcactccagcctgggcaacaagagcaaaactccatctcaaaaacaaagcaaaacaaaaaaataaaacaaacaaacaaacactagagtaccaagagcaaacaaacctcaaagctagcggaagacaagaaataaccagtatcagagctgaattaaaggagatagagacacacaaaaaataacataaaaaatcaacaaatgcaggagtggcttttcaaaaaagttaataaactagatacaccactagctagactaataaagtagaaaagagaaaataattaaataaacacaataataaatgataaggggtctattaccactgactccagagaaatacaaataaccatcagaaaatactataaacacctctttgcaaataaactagaaaatctagaagaaatagaaaaattcctggacacattcaccctctgaagatcgagccaggaagaaactgaattcctgaattgatcaataacaagttctgaaattgaagccataataagtagacgaaccaaaaaagcctaggatgagactgatgcacagctgaattcaccagtggcacaaagaagagctggtaccttgtatactgaaactatttcaaaaaattgaaaaggagggactcctgtctaactcattctataaggccaacatcatcctgataccaaagcctgtcagagacacaagaaaaaaaaagaaaacttctggccagtatccctgatgaacatcaatgcaaaaatcctcaaaaaaatactggtaaaccaaatccagaagtacatcaaagagcttatccactatgatcaagttggctttatccccaggatgcaagattggttcaacatatgcaaatcaataaatgtgattcatcacataaacagaactaaagattaaaaactacattattatctcaatagatgcagaagagggctttgaaaaattcaacactccttcatgttaaaaactctcaataaactagatattaaaggaatatacctcaaaataataagagccatatatgacaaacccacagccaatatcataccaaatgagcaaaagcaggaagcatttcccttaaaaactggcacaagagaaggatgccctctctctccacttctattttacatagtattggaagttctggccagagcaatcatgcaagagaaagaaataaagggaattcatttaggaagagaggaagtcaaactgtctctctttgcagatgacatgatcctatatgtagaaaatcccattgtcttagcccaaaagcttcttaagctgataagcaacatcagcaaagtctcgggatacaaaatcaatttgcaaaaattgttagcatttctatacaccaacaacaggcaagcagagagccaaatcatgaatgaactcccattcacaattaccacaaagagaataaaatacctaggaatacaactaagaagagaagtgaaggaacttttcaatgagaactataaaccattgctcaaagaaatcagagaagacacaaacaaatggaaaaatattccatgctcatggataggaagaataaatatcgtgaaaatggccacactgtccaaagtaatttatagattaaatgctatttccattaaactacaattgacattcttcacagaattagaaaaaaaaatttgtaaaatttgtacggaaccatagaagagcccaaatagccaagacaatcttaagcaaaaagaacaaagctagaaacatcctgctatccaacttcaaactatactactaggctacagtaaccaaaacagcatagtactggtacaagaaaagacacatagaccaatgaaacagcaatggggaaacaatttcttatttgataaatggtgctgagagaactggctagccatatgcagaaaattgaaactggaccgcttccttacaccatatgaactaaagatgattaaagacttaaatataaaactcaaaagtataaaaaccctgaagaagatctagaccataccattcagagcataggcacgggcaaagatttcacgatgaaaactccacaagaaattgcaacaaatgcaaaaattgacaaatgggatctaattaaactaaagaccatccacacagcaaaagaaactatcatcagggtgaacagacaacctacagaatgagagaaaatttttgtaatctgtctatctgacaaaggtctaatatacagagtctacaggaaacttaaacaaatgtacaagaaaaaaacaaacaaacccattaaaaagtgggcaaatgatatggacagacatacatgtggccaacaaacatatgaaaaaaagctcaacatcactgaccattagagatatgcaaatcaaaaccacagggagataccatctcacacaagttagaatggccattattaaaagtcaagaaacaacagacgctggcaaggttgcagaggaaaaggaacacttttacactgatggtaggagcacacattagttcaaaccattgtggaagatagtgtggcaattccttaaagtcctagatgcagaaataccatttgacccagcaatcccattattgggtatatacccaaagggatataaatcattgtattataaagacacaggcacatgtatgtccattgagcactattcacaatagcaaagacatggaatcaacctaaatgcccatcaatgatagactcgataaagaaaatgtggtacaatgcaccgtggaacactttgcagccataaaaagaatgagataaagagatcatattctttgcatgaacatgcatggtgttggaagccattatcctcaaaaaactaacgcaggaacagaaaaccaaactttgtatgtttgcacttataagtgcgagctgaatgatgagaacacacagacacatgggtggtggggacaacacacactggggcctgtcagagggtgggaatgggggtagggagagcatcaggaagaatagctaatggatgctggtcttaacacctaggtgatggaatgaactgtgcggcaaatcaccaaggcacacctacacctatgtaacaaacctgcacatcctgcacatgcacccctgaacttaaaataatagttgaaaaagtatatatatatatatatatatatatatatatatggaatagtcattattatattgattatatattatattgtcctaatcaaatataggtagagatacagatagtacaggcttaaaacagcacaaatatatttcttgaattttcctaaaatatcaaatttcctgtccatagtattatttttatgatcggaagtctaggccaaaactgattgtttttaaccatataggtcctagtaaatacacattttttaaaaaatctgtactctcctacaatcccagttgcctccagacacttaggttatatgatctggagcaattatcccataagctgtagtaaattatcacacttaaacatgaaaagttcaactcctctagggaatggtgtatgtataacctggtctttggaagtttcccattcaatttagcactaagctagttctctagcttctagtacattatgaaaacactgcatgagttacgtaacacatcctttgattatttgtagttaaaaaaattcttcaacactttattcaaaccaggtcacaagtctcattattctggccaaactccaaattaaataatgacattctcttctacatatcaacccttctttcacagaagagaaaaatagtaacttcaatccacagtctcacgggattttagaaagcaattatatgtccaaatacaagtcaaaagtagaaactagattcacaacccaaaaacatctcacaaggtaaggaataactatgtgtgcaaatagaggagcaaatcgcatttggaactttaattaaccacatgatctgagagctggcattcagaagttattaaaggaaaggaatatataatataaggagtttccaaaagagtgtcttatgtcatggaaaggtgttaaggactcttattcaaaggatttttccattgactaaagggaaaggtttgccctgagtaatgtgctcatgacgagaaatttaataacaaggatgaaaccgttttaccaggaatgattcaggaatacaatgccttaggtacttaagtagttgtaattgataccaaccaaaaatgaccacatttcctcacatatgtctttagttacatgccacatttctgatgaaaacaaggttgctagctggtccctaatggtgtcattttttgtgtcattaacttaatttgctttttattaagttctagtcctgatcaattataatagattctaggaaacaactcaaataatgtttctggtaaataaaatgctcccatcactaaataagaatgactaatgatacaacaaaaaaggaaatgcctcagactcttacggaaacaaattatcctccttttctccttgaataagtttgtatctactcttttaggggacaagtatatggaaaaagtcaataaacagaaaccgtcggaacttgcctaatgacattaccaacatgttcaaaaaaagtagattcttgagaattttataataaaacgtaacagatttattattccatttttactctttacaaaacaggtgcactaaccacaattggctttaataatgaaagtatttcaaatatcgtattcaacaatgaaatcacaactcccataaaccgtgctttcaatccctggtgcttctttaaactctgaagaactttaaaatttgaaaataaaaaataaataaaatgaatttttcgttttaaaattttaaaacaacttaaaaaaattccaatacctggaatataaagttagaatatggaaataaaggcctggccatcagctagtttttaaaactcctgagtgtgcatgttagattgagaactactgctctaaggaatgttttacatttcaaatattcagacagaggccaagttcctgttctaacaatttaattaattgttatgaaatggtgagggggttcacactcttgaatactactttgtgaacaaggatctctcccacaccttcccagtgacagttgctaataacgtctttgaagttaagtctgcatgaaagggcaatgtaaaaatcctttttataactggaaatgaatcagacaagcttctcagctactccctaaccaaattccagtaaatcttatattatttggcccattttccctaactcctgttgcgatttaattctgcttcagtcctatccaaattaccactctcaaaagattttgcttagcaaataactttttaagctatattatcagttcttgtcaaaattgcatgttggagcctggaaaatatcattttaatactaaaaatccctctagtaactcaattacttcgggattttgtcatgtgtgtgaaaagagtatttagttccaaaaatagagagacttctaaggtagggcaattttgttaggtggtttttttttttctttttcttttttaggtgagtattttaatttaaagttcaaaacaagttcagcagattagaatcccagattttttttagtgggggtattatcctcattttattattaaagggtgaaattaagccatagaatttcttcttaggaagctccctcctaggtaatgcagctgtcaagctatggacaaaccatttcacgtggttatttctttaacagtataaagtacacaagtgattcagctggggctttattcttgcctgcgtttctagaatgcttctaacctaaggcagcatttaaggtgttttatcccaacatctggaagtcatcatctaaacactcataccattaccccatgtctaatcttttgttctgctccttcatttgtttatgtaacaattgctttttaagcatttctgcatggctggcatttaggatacaatgagaacaaaaacacaacaggaaaaatatctgtctccacagagcttgcattcttatgggatagactgaaaataaacactgtaagtttcggataccaaattataaatgctaaatggaaagtagaatcagtgaagggtgtaaaaaattttggagatagacgtgagtttcacatggtagtattatatttcaatgggcgctcactgtaaaggtgaaatttaggtaatgaatttagaggccaggcatggtggctcatgcctgtaatcccagcattttgggaggccgaggtgggtggatcacctgaggtctggagttcgagaccagcctggccaacatggtgaaacccgtctctactaaaaatacaaaaattagctgggcatgggggcatgcgcctgtaatcccagctactcaggaggctgaggcaggacaatcctttgaacccgggaggcagagttcgcagtgagctgagatcccactactgcactccaatctcagtgacagaacaagactgtctcaaaacaaaacaaaacaaaacaaacaaacaaacaaacaaaacttaaagagaatcgtaggaaaaaaaactgcacatggtagaggaatagtaaatggatttgagggaaagctataaggccagtgttgcaagagataagtgcagagagaagtggggacggatcttggaggaacttctggctcaaagtaagaaatttgcatgacaggataaattcaattgattgtttgatagtggagaaagatgctctgatttatggtttagtaagatcactttagctaatacattaagaagagaaagtagtggtcatgtgcctaagtagacagaagagttagggagataggaatacgagggctgagacgtggtgtgtgtgtgtgtgtgtgtgtgtgtgtgtgtgtgtgtgtgtgtgtgtgtgtgaataaattgtttcaagaaggtgtttataaaaagtttaatataaattcaggaaactgcccaaatcataaatgctcaaccaggaagattttccaaagtgaatataatatatgtgtatatcaatcacccagaaccaaaaactgttaccagcatcaccaaaacctcttcaggcttttctgtcagtatccctaccccacacttctggcaaatatgaccattttcttgactttttatgttattatattagttttgaatgttttcaaaatttatgcaaatgaaagaatactctactaaatagttttgtgtctgggatttttttttctcaaattatgtttggagagtatctttcttattctatgaaataatagttggttaaggcagtcatcataatctttcaaaagatttatgtaattaatgtttgcttattactcttgtatccagtagaaagctaaccttactaattctaataatctctaggttgttttagattttctagttaaaactgtatttgcctataaaagtgacagcttttttctgttttccatgtttctaactttatttttctttcttccttgccttttatagggctttcaatacaatattgtaaacaagttattaaagcagacatcctaggatcatttctaatttgataaagtttacaatatttccatagtaagtatgatatttgtactttcttcttttctttttttttctttttttttttttttttttgagacggagtctcgctctgtagccaggctggagtgcagtggcgcgatcttcgctcactgcaacctctgcctcccgggttcaagcaattctcctgcctcagcctccagagtagctgggactacaggcgcgcaccaccatgcccagctaatgtttgtattattcgtagagatggagtttcatcatattggccaggctggtctcaaactcctgatcttgggatccgcccacctcggcctcccaaagtgctggtattacaagcgtgagccaccgcgcccagtcattatttgtacttttttcttagatagagtcttgctcttttgcccaggctggagtgcagtggtgccatcataactcactgcagcttcattgccctagccccaagtgatcctcccacatgagcctcctgagtagccgggacaacaggcatgcaccacctcacctgggtaattttttttgttttcttgtttagttttttgtagagagggagtttcatgttgtccaggctggtctcaaacttctgggctcaagcaatccttgggattacagacatgaaccactgtccctggcctatactagtttatttttaaataccatacgtcaaattaaaaatgttctcttctattctaagtttatgaggtttacaataaatagaataaaattttattgagtatttttctgctgttttactcattctcttgccacttttggtaagttatggttttctaggcacctccttatttcatctaaaatttcaaatttatttacataattttattggcataaataacctttatggaatatccaactattataaaataagtctttgtatatagacttgtgttcttgagtaggcttcctggatattcatgggtaaattactatataactcaagattctgcatatggttctgcaggctgagcattgtacaaacctagggaatggtattaactatggactgtgttgtgtgtggtggtgctggaatggggctaccagttttgatggacagggttaaggtaaaaactgcccttgctcatgcacatcatgcccacaggtgcataagggcactgctggggctaggtactctccacagtaggtaggataagcagaatgtgttccagtggggtcatcctctgcagcttcttcaccatgagtggatgggcaaattccaggctatgggccggcttaattatttcaaacctgggtggaaggtatgatgctccatcacagtctccaacccatttattgccagagagaccaacagaatgcagggtgtaaatatcatgaatacatcttccagcatgacactcatttggtattgattatttatttgtaaataccacagtatgtatttattatttgtaaacacctctatatcctggagagaaacgcctgtgagtggtaggtttccactaccaaacttcacctggcatttcatatgataaaactagcactctaaaaacacagtgttattcctttgacacactataatatttaaaaattgcttacaaggaagctaatcaaaagaaagatgttcacgatgactaaatgtggtatgccaataaacatactgtaagaaggtgtttggaaaaataggagaaagggattgaagttgtttctgcaaaatgtgagcatattaagtaatcgttttatacagaaaatgatttacaagcaatgctagttgtgtaaagtttgcaaaatgtttccactttataactgtcaccaaacaaggggggaagtttcctttaagtaagaatttgaatagctttttgactttaaaattgagagttcagcaaaggtatgtttctttatgaaatcagcagacaattattgatcatcaactgtgacggagaacacaacatttgaagtttcttgctcttctacgatctagatgctttagttgactgcaaaagccaacataacagctgttttgtttttatttcattattcactgtgaccacttccagaagcattagcatggccaaagtaaaatcggaaaatcccactctgggaacgtgaagatggatgaaaagggatgacttgggtcatcccgtttttacgtttaagcacgtcaaaaatttattcctatgacgttctgcaaaatacctgcccagtaccctctgaactataaaggtcatcagaaacaacaaaaatcttagaaactgtcacagccaaggggatcctaaggagatatgacaactaagtataatgtacttttctggatgagatcctggagcagaaaaaaacaatgacttaggtaaaaaccggagaaattattctgaatcaaatatgggctatagttacaaataatgaatcaatattggttcattaattatcatgaatgtaaatactaatttgttaataaaaggggaaactgagagtgagggatatgagaattctctgaaatatatcataacctttctgtaaatttaaattgattttaaaattaaaagcttttttaaaaacaataatttataaatgtgttttcactgaaaaaaagctaagtttttttttctcagcttgtgcaactttattatacatttgtttaatgcactatctgactgcgatgatatatctaccatatggtctctcattttgtatatagtatttatagagcaattcgtggctgtacagtgagatgtttggttaggataatgtctaagattaatcagtaattctgattaagcctctaccatgtgcaacaaagtacattctagatgctttggtaaatacccaggtaaatgagaaatgaatctttcttttttgctttggagatggagtctcactgtcacccaggcttgattgcaatcatgcgacctcggctcactgcaacctccaactctggggttcaagcgattctcctgcctcagcctcctgagtagatgggattacaggcacacgccaccatgcctagttaatttttgtatttttagtagaggcagggtttcaccacgttggccaagctggccttgaattcccgacctcaggtaatccacctgcctcagcctccccaaagtgttgggattacaggcgtgagccaccgtgcttggccataaatcttactttaatctagaagagaacataagatacacacaagcatctataatacagtacgagaagtaataagactgtagaggatgttgctgtgtgtcatcccgatcttgcctttagggcagaggcatttatttctccagcttgctggcttgtcatatgggttactttttagagcccagtgagcttggatttgacaagacatgtcctcaaaaaaaaaaaaagagatagaacaaattattgcatctcacgcttccgagcactaagaaagcagattttgaggcatctttgagttctggaggagccgtatgacacacttgagaataccgctctaagtattttatagacagcagtggaaggctgacagctttgagtggaccagagcaggaaaaggctctgcagtttgtggtgagcaaggggccctggaaacctgtcatataatctggcagtttcaatctggcagtttcaattattctggaaataagaaagatgccttgtgaagagagaaaaatataggcttctagcattctataagaagacaatatacagtagaaaactaggcaccatttgaaaagcatcttttgttatgccactggtatatgtagagaccaaaaggccacgtataccaagtgtccgtgaaatcagagccacccagtatgaggtgtgtattattacactaatcgtgtcatgagactgaacagacccagtagcaattcttcatgggatgaaagtggtactcccaagatcaggcagaagcggggctggaagagtcataagtaagctgcagggagaggtattccaaactcctatctcaccaatgagctcacacgtgcagacctcaacaattaaaaataaaaacgatccagggcagagccttttctcttaaacatgtcttaagacttacatgtgtaggtatatctgcatatcctaaatgttaattataccattttatatgtttttatgcttaagctaacaactattttgctatttaatatatagatttcctctacccctcatatagtgtgctgtgaatatttcaaaaaacaatgtttattttctttttcataaagtttctactaaaatttctcttagaaattattttggagacatcgttgcacttggccgaagttaacagtcattgaaatgaagattcagatatttctaggaaccgcctcccaacaccttcattttcctgtctccacgttagtgacagattatgtccaatgtaggtgaaacacacattatactaagcagaaacaaaatacgtttttagagtgaaagagaaaccttaatcttgtaaaatatacattgaaaaaaaaagaataagtttgtactgcttaggacaaaaaagctgcattagttattttttttccatttagcgttttaattgacagatgacaggttgtatatttttatagtgttcacatgatgttttgctataaccctcagttattttaacaaggaaaattagtataagtgctcttcattaggtagtaaagaactggaaaggtaaaaatttcaaaagtattccagagatagcaactgttgaaagaagccatcgcccttagggctgggttgggggaggcaaaaagaagcacttaaaattattaaaacttagaaatttgaggaaagagtcccagggaactggaagtcagacctctttgagaaagggacatcgttaggctggtggtgcatgtgcctccaagaggaaacaatgaagagtgactgtgaatgctggaaagacccacaaacgttgcactggaacaaacagtgactgtcagggtgaacaaatgttcctggagtgatgctaatcggaacaggatgcaaaaattgaaacagaaaacaaataagaatgagcatctctagttgctcctcctccagccgtccctctccattctctttctctagtgacccctactggccgatttcaacagggaccccaccaaggctgaaataagattcagcaagtaaataaggttcagcaagtacataaaactcaggttcagtatcccaaagcagagcatagaagagaggatttgcaaaggtaacttttacatacattcacaaataagtagcaaacaaagaaaagagctcctatatacagataccttgaagggcggaagatgtaaactaaaagaaaaattatgatgcctctggaaacaaagctgctatcaatactccttttatgtctttttttcatttagtaatttttgtggtctcatattttacaggtaagtatttgatccattttgaaatgactgaaatggctagtcacgtgccccaacatcatttatataatgatatattctctccccactattttaaatgttgtctttactacatactaaatatctgctttttattctggccaatctatttccttttatttttaactggtttatacctgtactattgtaactcattttaattatcatagctttgtagtataatatattgcctactcataccttattattacttttatttttaaaaaatttatcttgcatgtttatgtttctaaataaatgttaatggtattttctcaaactctagaaggaaatatgtttactggtggctcatttgtgattatgccaaattcacagaataatttactcattgttatctttatcatcgtgaatcatcgatctcagaggtctctcttttgccttgctcaagtattactttataagtttaatatattcaataagtatttaaaattcttggttattgtgatacttttcttccattatattatctagccaattactttttgcagaatgaagagcttatcttttaatattaaatcttgtccctttgattttgtgggattatgttattcatattttcagttgaccaccattggttctaggaaaaaaaaaatacatagacaaataataataatttgattcttcaaacttccacttatttatttatttatttatttatttatttatttaaaattgtggtaaaatacacataacataaaacttaccagcttaaccaattttaagttttaagtagtgctaagcacattcacactgctgttcagccaacctccagaacccttttcatcttgcaaaactaaaactgctcactaaacaataaatttccatgacccctaccctctagtctctgttaatacctggcctttcaaaccttcctatgataactgcattttgtttgtttgatgtattgagtagtacttcaataatgacataaaataatagttgttacattgataattctttttcttttttaccaccatcaatgggaatgtgtcaagttattagcaaaattaacttgacagaaaagaaatttgttgaaagaatattgattagctcacaaaattactgagaactctggtggtgaacatactgagaaaacaggcaggaatcagagaggtcaggcaaattggtgccacagagtcaattcagggaaggacattatcaccaccacagccaaacctggatattgtagctcatctcattccaactcttggcccaggctctggtccttggtcactgcattccatctctgcattccatgcactacatggccatgttagtctctgtgaactgggaattgtttccctgtcattgttggctaggcagggcttctgcgtaatccaactctattttaaatctgggtcagatttgtttaattggccatgcttaactgcaaagagtagtgtgtgtaaatttgtgtgtgtgtgtgtgtgtgtgtgtgttcagaaacgagtacctcttttgttttgcttagttttcttatttgattttgttttgtatttggcttccacagtgaaagtcaatctttggcatccagggaaatatatgaaatggggagttccttcttgaatttaggagggggttcagatgctaagaagaaacaaaaacaatgtttcaattcatagaaattctagtcttttactcttaggcttggatcagttctaggtaacctctctaaatttggcccaaattttcttatacttgataattacaacataatgtaagaaatttgggagttttcctagacgctaaatcggaatgggttttctttttttcctctatgctttaggtttttaaaaatgagttttagagagagagaaaattaaatatacttttgttccactaatacttattgcaatcatcctgattattgttacagaagttaaaagagtaattttaaaagtcttttgtgtgagtaacagtgtgagtaagtaaaagtcttttgatagaataaaaaagtgtttaagaacatttgtattaaccagggttctccagagaaacaggaccaatagggtgtgtgcctgtgtgtttctctcatatatgaaagagagagagagaggaaggcaggcagagagggagggagagagagagagagagggagggaaagagagagagagagagagagagagaaagagagaatgattgagatttacagatatttgctcacctgactatgggagctgacaagttcaaaatctattgctatcttgagtccttaggtaatctaaagacagaattcctgcctctccaagagaactcggtgttttttttttcaagaccttcaactattggttggatgagacccacacttctgagggtaatttgctttactcaaagtccagtcatttaaatattaatcatatctaagaaaatgccttcacaacagcatccaaactggcatttggctaaacaactgggcaccacagtttactcaatgggacacataaacataagcaccatggaatgtaatgacatgtcttgccatgaaaactgataaaatccccaataaaaacatactagacagtaaaaatgaggcaatatcttagagagttttgttgtcacaagtggtcaaggggattggaaaggcactgtaaaaaatgcaaaatatgttatcatcttccataatataccaatttggatgagaaagttaatatacataatagggttgaaaacttcccttattttttgacttaaatgtccatgttgacttacttagtctgtaagtcccacgagagaataaaaaaaatgcttatttttttaaacaccaacaatctctgacaacaatgaacagcatggagtagagactgaaatactgtgtttatccatttaagtaagcatataaacaacatgtgctgttagatgaagaaaatcacctcgtatcaggaatcagaatgcaaagtgacaaaatgtttatactctagaaaagagattttacgagtacatcacataactgagcagtgggacggtcagaacaccatctgtatgaggaatgaaaagaattacagaaaatgacaagtgactaaacactataaagataacagataacagcactgttctaagacctacctccaaacccttggaaaatagaaacctagtttctattgcggtcctagtttctcaggaatgagccattgcagagatgatgggagttcctgggaacaggattgtacttgtaatcattgatgctgacctagtatatgtactatggactccccgcccacttttacatacttttttttctcatccctacctccttaattctaatcttcatttgaccattcctccatcctaaatatcactaataaaaacaatgagaaaaaaactgaagttatcacttatttcgcctgcagatatcatccaaattctttttgagtaactatttcctgtattcatattttgtctactcactttattcctcaaaatttttcaaactaatatatctactgttttatctcaggttcttagcctcaactattcagtagcattcaatctattaaactgtctttaaattatccctgcttctataatcatcccattggtggaaacatttattttccataattcacttagaaagctcagcatagatttgtcctctcattcggcattttctttcattttctttggttaaatgtgcacctccagtggagaacatatacaggtactgcgatggtatttaactatatgcaccaacttggctaagttgtggtgcctaattgtttagtgaaacactaacccagatgttgctgtgaaagcagttggtggatatgaacgacatttataatcagttaaataaagatttccctcaataataaggatggacctcatctaatcagttgaagacataaaaggcaaaaagtgaggtttcctggaggagaagggattctgtcttaagactgtagcatataaaatcctgcctgggtttccagcctgcaggcctaccttatggattttgaacatgccacccctccctcaattgcatgagcccattccttaaaataaatatctctctatacatagcaaaagtgaccatttatctggaaagccctgactgacacaactgctaatctatagctgttgtttccatcgcgttataacaaataactaccaaatcccatatttctcatctatatgcagaccagcttgaatgtggatgatctggtcaggctttggctgggctgttctgcttcaggctgtggcaatggacacctctgcttttctctgtaggtctaggggtcagcttgatctctcacacttcatatactggactagtagccaggatggcagagatttaacacaacaagcataagacacaaggcctcgtaaaatctaggctgaaaactgacacactattacaatgactcacatgccgttggccaaaacaactgacggtgctatctcgagaaaaataagcaagttctgcctacaataagcctgtgttttggatactgaggagagaggagtgaggagtgaggaccaattgcccagtctatggcagagaaataagatcactgtcttgaggggccagtaggcctggatttgattgccagttttatgtagtaacattgatgaaaaaaatggggatgacatctacctaatttgattcttgtgaagattcatgagatagcaaatgtaatttatttgctacatggtagctcaattaaaaactcaatgcttatgaatacggaaattttagaatacaataatatactgatagccagatgcatatcataatttaataaataataacttcaaagaaatctgtttagccaaatacttaaaatgtattaccttagtcacttttaatattatacatataaagtcgggtgcagtggctcatgcctgtaatcccagcaatttgggaggccgaggctgggggatcatgaggttaggagttcgagaccagtctggccaacatggtgaaactccgtctctactacaaatgcagaaatcagctgggcgtggtggtgggcgcctataattccagctacttgggatgctgaggcaggagaatcatttgaacccaagaggcagaggttgcagtgagccgagatagcgccactgcactccagcctgcgtgacagggtgagactccgtctcaaacaaacaaaaattatacatataaaatatgttttcatgattttggttattaaaaggtataatcagtaccacaatattacacaattttataagcccattttttaaaaatccaagtcaataaacttttggctttaagtagtgtgagttggcaaaatctacattcacaacactatcactttgagatttgtgtcactcattctgaagacccgtagaaatataaattaaccacccaggacaagaggttgactgttaatttttctaatttaatgttcaggtttgtttctggccaggggtacgatcaaattaggatgtgacaaagaccccttccttcaccaaagtttttttgatctcctctaagccctcttctccactaggcctgtttggcctctagagtcccattttagtgagaatcctgctaagtcagcttagagagaatttcccatccttgatatctgattaccctgatttgccttcagcaagaatcctgttatgtcagtttaacaagaattactgccacctttgatgcctcctcttagtaattttatatccatcactttcccccagcctgaacattggctataaatcctaacttgtctttgctgtatttggaattgggctcagttctatactgaggtctcttttcccatattgctatggtacttgaataatctgttttaattgccttaactactatccagctctagctttctttaaatagataggtactcaatgcagcaaatcctgtcatcagagaaaaagaaaaaactggggatgcaaatccagcaggccttgtatttgtagccccagaaaggactcaagaagcataaaccaggattaataatgcaatgttatgagattctgtaaacataaagctaccccaagtttgcagctgcccttagtggtttaatctctgactatttccaagatgggattgtcattaaattacaaccgttgagacaacatgagttcttttgtacttctttgggggtggtcaagagagaggaaactgaagacatagtttgtcactccatagccagtcattatgggagaaaagcagagagacaggaataggtttaagcagataaaaggagaacgaagagtaggctatccccctggtgcccttggaaaggaaaatctattcagtaagggacctgacatggatcttacaacaagctaagggatataagcaaatatctttcctgaaaagatgatactattgcatatgtattgctatccacacttccgcaagttttagccagtgaaccaatacaattgtagccagtgaaccaattaaatgcatacaaattttctctgctccttctagccttatagggtaggaattctttccaccagtgaatagatgaaattatgtagcctccataaaattcagtagtttgctgcatccatcatgctagaaaagttgctaagcaacactgagtaatttcagggcttctctcatgactccttgcagcctcctcccccaggaaaaatatataaagctaaaatatatcctaattaggctgcagcagttgtttttctcctgggctatctccccatgctcctgaacaagggcaggaggagacaattcaggtgggctcataacctctatccagcatcagccagaggggtgccactgagacatggagtttctaaataagagaaaaaatgttttaaaataaggagcctaactcagcaataaaaagagctgaactattgattcacctaacatcttagacggatctcaagcaactacactgactgaaaagttagctttaaaaagttacatagggtgtaattccatttctgtaacagtgttgaaataacaaaatgatagaaatggaagacagattagtggttgttagaagttagaaggttggggtggtagggatgtgaatgtgactacataaaagtcagtacaggttaaaagggtcccatatctttattgtgggagtaatcacacggatctacaaatgtgattaaagcacataaggctaaacacacacacacacacacacacacacacacacacacacaaatgaatgcatgcaaacccagtgatatctgaataagatctatgactgtcagtttcttgattgtaatattgtactcaacataggatatgaccattgtttgaaacagagtcactggtctagagatctctctgtatgatttcttacaactgcatgtgaatccacaattacataaaaggttaaaaaaaaatatcacggccgggcgcggtggctcacgcctgtgatcccagcactttgggaggccgaggcgggcagattacgaggtcaggagatcgagaccatcttggctaacatggtgaaaccccgtctctactaaaaatacaaaaaattagccaggcgtggtggtgggtgcctgtattcccagctactctggaggctgaggcaggagaatggcatgaacccaggaggcggagcttgcagtgagccgagattgcactgctgcacttcagcctgggcaacagagcgagactctgtcttaaaaaaaaaaaaaaatcactggcccagagcaaagctagagtcaatatgcttgacagcgttctgtccttgggcctttccttagtaaacatttataactaaagtgaatgaatatttcgaagacaaactcatgtagtttggcatacagtactaacagaattagcattcaagattcaccattatcacagagtagacaaaaattgcctgaacacattaaggtagcttctatttattgaggtcatgttgggccaggcaaatgttcttggtatgtgggtgtcatctcaactgctcatttccaaaatcttgcaaaggagttgctatcatcaatctctatatatgccaggaaactgatttcttaggcagtattttcccccaaagtccaaataccaaggagtatattaaccctcattccacatataggcttctgttattccaccggttatttctatttaactactttgtacttagttaaaaaataactagttctgcaaagaaggataaaaaggagctgacagaaatagattcacaaacatgcacgcatgcatgaatgcatgcacacacacacacacatacatttcttaattggaattttttgcttaccagaaatttgggtgctagctaaagatacaaaaatgatactagattttactaaaagtagcaaatgcatatgataatgggtatttgtgtacaacattctgtgttaataaagacattgatattctctattcattgaatctcatttgaagattaactctaggcattacatattttaagatgatatttacaagtaggagtataaaaagaagaatatgctcaggatgatcttcttgaaggtagtctctttccatttctgaaatcccaggctctctagcacagggcctgagacacacatgaggtttcacaaagatttgttgtagaagaaacaatgcttagtgtcgaccaggattcagtaaactttttgtgttagtttgttctcctgctactaataaggacatacctgagactgggtaatttatagaggaaaaaggtttaattgactcacagttccacatggttgaaaaggcctcacaatcatggcggaaggcgaaggaggagcaaagtcacatcttacgtggatggaggcaggcaaaaagagagcttgtgcagagaaactcctgtttttaaacctatccattttcctgtgacccattcaccatcacgagaacagtgcaggaaagacctgcccccatgattcaactaccttccaccggatccttcccacgacacataggaactacgggagctacaattcaagatgagacttgggtggggacacagccaaaccataccccccctttttttttttaatgtaaagggacagagagcaaatactttaggttttgtgggtcatagttgtttgtgttgcaactactcaactcttccacataacaggaaaccagtcagaggcaatgtgtaaaccaaagggcatgtggtgtttctatacaatgttatttataaaatgaggcagctagtcatacatggcccccaggcagtaccatgcccatcccttgtataaaacaaaaataactaattaaagatatgatttctttattccttactggcagctttctgaaaggtaatgtggccgtttgttgagaagtcagaggacaacataactaaattagaaaaatttacagaagagcaggtatttttatcctttagacaagaaacattatcttacagacatgaatgatattttcagcaattagatcatcactagtggttctagttgcctcaagacagagctttacttattgtttggtatattcaagtaatggtagataggatgtcaatctacaggtgtaatattgtgcatatggttaaatatgaatccagattcggatatgtgggtcctgctttgagcctgagagtctaacaagctcccaggtgattcccatactgctagtctggggccaagctttgaatagcaagaatttagccctgtgaaataaattcttactttctgagattttaaaataaatttctaaacttaagaatctatttgcaaattatagctataaagtgcttggcattagggtcctccccaaatcttgtctttttttctttcattttaggaaattatttatatgatcgtttacctctaaattttatctgatttaaaataagcttgatttctctagtgccaaaatacatccttattcagtattttactatagtgaaataaagtgcatttagatggagtaaatattttatgtattaatattttagaagaaacacaagatatcttcacttgtatcacatatattttataattactttcgtaataacacagacaacaaaaaaaaagtgttgagagctgagtataagctggtgactctcccacataatcttacatttatctcactcttgcattttgcagatctaggaatagtggcacagaaaagtttacaagttccttaagtaggagagccaagatttgtttcagagcctaacactgctgtaaacacttttcacactaaatcatatggctaatattaacaataaataatacagcaacagcagatgaatgaggatcctgtatgtagcctaaaaatctgtgagtttaaatataaaaacctggctcatctccattatgttaactgaataaaaatataagacaactgtgctttctgactgcaaggggaaatctcaaagaaattttgtgcaaagcctctggttatgaggaaaagagagaggggaaaaggaaaaagagaggaaggctggaaagagcaaaagtcctcagctctaggttggagaaaaacaaatggtgaccagagtcagtccacgcggctctgcagatcctgcgtcttgcttggagaagccattagaacgcagcccccggcagggaaccacgcccagcctccaggccactgtaaaacagcagcgcctttttccacgagaagaataggccagtgtctgtgccacaagcactttaccacatgctcattttggttgagaaagcagtgttgagggggaaaaaaaaaaaaagccagagtcatagatttttccttactttttttctaaggcaaacagaacacttcccccactctgaataagcctgaataaatgacatgtgcgaaatgacatctttctttacttggaaaaaagaataaaccgactttttttttaatatgtgtatggacctcaacgttatctcagcagataacaataatacctgaataacgttgaaaatgtttttcatgagaaatcatctatcagatgttaaaagaaaccatgacaaatagagggattgcctgactggagcatatatatacacacacatatacacacacacacacacacacacatatacacacacacacacacacacacatacacacacacacatatatacacacacacatacacacacacatatgtatatgcatatacatatacacatatgcatatatttccatatatgcatatacatataaaatacaactcatgataatttacttgactctgtgcctataaattttgcttacacagctgggtgatgtcagtttattacaggattaaatgtttattcttagtggttgatgtattcctcactgcggactataggcaaagtcaaaaatattccccaagacaggggaggaaagtcttcttgaggccagagcaggacatcaggacatcaggggaccatgcatccaatactcagatgcaacataactacctttggaaaacggcaagaccaaaaccctttcaatcaaggcagattcaggaaatttctgtgggtgtgatgagtagatgaaaatttaatttgctcaaaatcctgggtaccattgttcaaaatacaatgaacatttatatatcatggaatgccatttattttttccctcagtgattcagtagggtttcaaaaccatcgatgtatccttagaaggctggattatcattgcacacactatagaacaatctagattagggggaacatctggatacattgatgtttatgtctgttttagggttatttcaagtacaacatttttttgtgagatatatatatatatatagtctgccctccatatctgtgggttctgcatccttagattcaaccaactgtggatcaaaactaaaaaaaaaaattccacaaattttcaaaaaacaagaaaaccacacaatgaagtgatgtgtaggccctgaattagatattataagaaatatagaatgtattatatatataaagacacgttttcttctgtttcccaggctgaagagcagtggccccatcacagctcactgcagcctcaacctcctgggctaaagggatcctcatgtttcagcctccagagtagctgggacctcaggtgtgtgctaccacgccaggctaattttttaaattttttgaagagacagagtatcatcatgttgtccaggttagttatataaggaacttgaacatctgcagatgttcatatctacagcaggtcctggaaccaatcccccatggacatcaaggatgactctatgtgcatatgtgtgtatacatatctgagtgtatatgtgtgcatgtgtatgtgtatacatatacaaacaaacacacatatacaggcacacacacgtatacatgagctcacacatgaaaatacatagtcatttatatttaacaatctaaaccttaccaagttaaaacatggtagattttcaaagacattatgtatgaaatactctcctgttagcgaatttacaaacatctttctatactctccactacgggtttatcatttcatcccaacatgactagaagcatttcccacagatcaagtgagatagctgagcaaacagcagattgtattgctagcagcctcttgcagaagtgtctttccttcttttttttttttttcagtcggcctcatactgtctttattaggtattatgattgtttgaagagacagcatctctgggaggtaagtaggattagaaaagataatagttctttaaagggaatcaacacccttgtaaaaatatacatgtatctatctctttcagacaacataaatgtcatttaattattattccatgatggtaaatcatttagtaaacagataatcatagttgagtattctaggtttgaagaagaatctttctgatcagaacaagggcccagctttttaagcagtgctcattaaagccacttcccaaggtagccacttcgaagcatttattactctactgtcccttgaaacatttattactctactctcccttgtgatgtgtgctacaagatggcagctcccacaactgcattctgaggacttagaagatatatacccagacgtgcttagagtgattttaaccactggttttatcatcaggagaattttcttggatgtactgggttttataggacatcaagaagctcctccttgatcctgcactattttgttgaaccaaataagactgatcctttttccctaaaaatggccaataaatataaattcatctaatatacctatatattttaaaccttttgtagcttgcctgaaatcccatcaactaaagcttgatttagtaactcttactccttttgaaactacaaatacaaacttgcctgtaacgtttctcattcggggtgaagtcatttaatcagaatccctttcccccgcagcctctgtttctactttaatgaggcagtagttttctctcatgctttcgatttcttcagaatggaacacttgaataatgaaaactcctccatgagatagaataataaggaatatgagtagctaaaagggcagatttgatattgaaagttccaggtggaagacagggtgaaggggatgcaacttagaggtcatggcgtccaggatacacagtggaattgcttcccacccttgccagggaggctgcagaccttaggagatgagagtgtagattctggaactacactgcctgggaggaaacatcaattctgccatttactaattagcttcccaactcctctgtgtctcagttctgtcctctataactgaggtcactgtgagagattcagggagttatatatgtaaagcaattagaacagaacctggcatggacaatgtgctatacaaatgtttgctgtcagcatttccctgatctccatgccgtggtttcaacagggtgcttattacccaggccaccataaaacctccagtcttagtatgtcatatacaggtcctttcaacagtataagtaaatgccaggaaactggagataagccctcagtgaagaaactggccttatattgtgagagaagttgggtagtgttatggcaaagttgctaggatgccttgacaaacacaacaatttgaaaatccccagctaagactctctttgtcagggaaacatggagctttcctagaaacacactcccagttatgatttctgagttgagaaatcatacagctgggaattattttcctgtacttttttaatagaaatgtgttttgtatctattgagaagactatgtttttctatagtagcatattaccaccaaggggcatctgtcgtgcctccaaacatactttattgtatagaaatacaaaatccaccatttaatcattacttacttaaaaaccagaaggcaattagctgggcgtggtggcaggcacccgtaatcccagctactcaggaggctgagacaggagaatggtgtgaatccaggagggggagcttgcagtgagctgagatcacgccactgcactccggcctgggcgacagagcaagactccgtctcaaaaaaaaaaaaaaaaattaaattaaaaaataaataaaaataataaaaaaaagaaggcaaaattttggtggctcaattcatgttctctttcttttacccaatgaatataataatatgtgacaagcgagacaaaacaaacacatagaccaacaatgtttcccagtttgttgagatcttgttttctttaaactctattctaaaagtctagaatctcaaagtctttgagcatcctggctaccgcttttttgctgacccagctttacaaatactaaagctcataatattacctagtagaaaattcagtcctagaatcacattatatttttagaaattgttacacattaccacctgttcttgaacaattaaaggtacccatgttattttcctgtctcttattagagtagcccatcattctgtcctcttacaggtttcatttctctcagcattgtaaatttagtgcaacatcgaagaaaatctagtcctcgaattcacttgtcaatgttaacctgccatgagtgaaatataaacgccagtgttatttcaagtggattctatttgacagactgttgggagtaacagatgctttagaactggctactatgaattctctgtatactgacagattagattgcagggaagaaaaaaaaaatcacatgagcttcatctcatgtgtagcaaaacaagccaagttctaggccagagaaaaacaacactagcccttaacctttgcttgatgaatctctctctctctttctttttaaaatgaatacctggaataaattcatctccataagttgtcctacagaacttccaaaacaaatcaactaagttgatttaaaagaaaaaaatatgacactattatttaatagtcaaaacaacccactctcctgcagtctaatgcttttatttgtcaaagcaccgttgtttgtatttttatgagtttggtttctaagctttttgaaagcacatattctagggctttgtaaacagtcacattttcagaaagcatattcttttttacttttgggctatatatccaaacacataaaattattatttatttctgtggtaagaacaccttaatgtttaaccaagggactcttaaacagtgtaaccagtgaaaaatcctggatttgttttaataaattgacttttacgaaacctagttttccttgagtccttggcatgacaacattcctttagaattacttagcccagctgtgcagtgggtgaagcaaagggcagagttacctaataggaaaaatccattgtacatacgctaaggtgttagccctcttgaattccctacttcatgaaattcaagaaaatgaaaagaacttgtccaaaggaaaaaaaaacttgacttacacttaagctcaagctgcttttcgaagcctaaatgggaggcatcgggatccattagagagttctagatgaaatgccagaagccctgggttctaatcttggctgtttgtctttagccaagtcatttgaccttactggaccccagattcccgtctataaaatgaagagtgtaatatttgtcttttctactctacaaagttattgtgaggataaaataggaaaacagatgtgaagcttcccccagagaaatatataaaacagtacagatattaataccgattctctttggcccttatactggtcaaacttgttcaaaccccaccttattctcctgaaatagaagaggttctttcgctaagattagaaactctccaagttaatgattcattcttaggtattatacataagatgtaacacaagttttggaacagtagaaataaaacaaaacaccagttattatatcaaaatttcaggagaaatttctctctctctcttcctcactaggaagtctactcattgttttcaatcctcatacaaatatatacacttgaatattttcttgtacacatgcctagcccaacaccagcatgcccacatctccccaccccacattcacattcttcttttccaaaagcccaaatttatctcgctctcctttgctttaatttgttatcttccaccagttactctaagttcctccatttatcccaagccttaaccaaaattctttgacaccacagggctcatacatttaaaaagctgtttctggttttgattttctgttgttgttgttgacctcaaaaagaaaaaacacccacaaaatgtgctcccatcaattggtgtgtatgttattttgaggaatcatagttttatttatttatttatttatttatttatttatttatttacttacttatttttgagacgagagtcttgctctgtcacccagtggcactatcttcgctcactgcaagctccgcctcccgggttcacgccattctcctgcctcatcctcccgagtagctgggactacaggcacccgccaccacgcccggctaattttttctattttttggtagagacggggtttcaccgtgttagccaggatggtcgcgatctcctgacctcgtgatccgcccacctcggcctcccaaagtgctgggattacaggagtgagccactgcacccggcctcatagttttaaaattgaacaaaaaaagacactttaaagattgtaagggtctgattgcctcaacaccataacttaattaaaaatattactgttgaatcttatttggttaatttgtctgagacaactggacctgttgtttacatgaactgtcaggaagtattaaatcagccaactagttgctgcctaagacagctatgggaagcctggtttgcatcaaaaggtcaacaggaagaaacttatggagaataacatgttatctgaagaagagagtggtatcatttgctgctctgtggctattctctatgccacatgatgtcaaggcttcaacatactttaaagtatacatagaattttttctaaacttagaaattccataatgttggctatggatttgtcatagatgacacctattattttgaggtatgtttcttcaatgcctagattgttgagagtttttatcatgacgggtaaataggaagcattcccctggagaactgaaagaagagaaggatgcccactctcaccactcctattcaacattgtaaaaaagtcctaggaagagcaatcaggcaatagaaagaaataaaagacacggaaataataaacaaggaagaagtaaaagtacctctttccactgactatatgattctatagctagaaaaacctaaagttgctgtcagaacattcctagaactgaaaaatgacttcagtaaaatttcagaacacaaaatcaacgcaaaaaattcatagtatttctctataccaatattgtttaagctgagtgaaatccagaacacaatctcatttacaatagccacaaacaaatgaaatatctaagaatacagctaacaaaggaggtaaaaggtctctacaaacagaattataaaatactgatgaaagaaaccatagatgacacaataaatgcaaaatatttcatggtcatggattggaagaatcaatattattaaaatgaccatactaccccaaacaatctacagattcaacactacttctatcaaactaccaatgtgacttttaagagaattaaaaaataattctaaaattcatatggaacggtaacaacaacaaaaagcaaatagccaaagaaatcccaggcaaaagaacaaagccagcgctatcacactacctgacttcaaactgaactataagtctacgagaaccaaaacagtatggtactaacacacaaaaaaacagacatatagacccatacaagagaatagagaactcagaaataaagccacacacctacaactatttgatctttgtcaaagtcaacaaaacaagtgatgggaaaaatacttcctattcaataaatggtgctgggatagctggctagctatatgcagaagaatgaaccataacctttcaccatgtacaaatactaactcaagatggattaaagatttaaatgtaagacctcaaattataaaattcctaaaaaaaaagtaggaaatacccttcttggcattggccttggcaaagaatttctggtcatgtcttcaaaagtaattgcaataaaaacaaatgcagacaagtgggacctaattaaactaaagcacttctgcacagcaaaggaaagtataaatagagtaaataggaacccacagaattggagaaaatattcaaaactatgcacctgcaaatgtctaatatccagaatctacaagcaactaaaaaaaaaacaagcaaaaaacaaataactttattaaacaataggcaaaggatatgaatagacacttctcaaaagatgacatacaagtggccactaacatatgaaaaaatgccccacatctctattcatcagggaaatgcaaatcaaaaccacaatgagatgccatgtcaaccagtcagaatagttattattaaaaactaaaatatgacaaatgctagttaggttgtagagaaaaatgaacatttatacattgttggtggaaatgtaagctaattcagccactgtggaaagcagtttggagatttcttaaagaacttaaaacatccatttgactcagcaatgtcattactcagtatataccaaagaaaagtagatcattctaccaaaaagacacttgcattgacatgctcatcaaagcactattcacaatagcaaagatatggaatcaacttaggtgcgcatcaatggtgtattggataaggacaatgtggtgcatatacagcatggagtactaggtcattatatgaaagaaaggaatcatcatttacagcaacatggatgcagctggagacctctatcctaggtgacttaatatgggattagaaaaacaagtaccgtatgctttcactttaagtgggagtgaagcattgagtacacatggacataaagatggcaacaataggcactggagactactggcgggggaggaagtggggtgtggtttgaaaactctctattgggtatgatgctcactactgggtggtggaatccatgccacaaactcagcatcatgcaatttacccatgtggcaaacctgtacatgtaccccctgaatctagaataaatgttgaaattaaaaaaaaataaattccataatgattccagcattatgtcactatccttctaaaagcatgctgcaaatttccaatcatttctgaattaaactctccaagaaaattgtcctgtaaaatttcttttattctgttatacacatacacacacatttttatcttttagatattttaaagaaaacatttcataaatgtattttaatgtagaccaggatatttgtacaataactgtacacttggaattcgtactgtcagaaaaagaagttatttttgagtgagtacttcttcaacccattctctttcattttcatggtatataaaagctttttctttatgttaaaatgttttatgaagtatatgtctcttaagatactgtacaattctcattaccctgaccattgtaccagtcataaaatgtgatcttgagaagttccttaaaccctctgtgattcctcttttgttgctgttttgtttgtaattgtctggggtctacaccccagacagataggtactacaaaagcacctatctcataggttacctgtaagtttgtcatgagatgctacaaataagcgtttaaaaatgttccaagcatcaaatcactttacagtataagttagttgattttatcaatgagtttagacccccttcatacctggcacaacacacacagcaaaccatccatcaatagtttccgaacaactcaatgtgttatcatatgtatgctatgactcataaataaactacttctttgaaagtttctcaaaaaagatattgcctaagtaatataaaggcatagatagatagatagatagatgacagctagctagaaaatgtttgtgttttcagtgtctatcgccatgagaaaagctgtggataatgaaaacaaggcaggaagagacatctgtatcttacaattcaagtaacatacagtcagtctctcataacatgctgacatagcttaaatattttctcacccatatttcacgttgagatgtaatccccaatgttgaaggtgggacctggggggagatgtttgggtcatgggagcctatccctcatggattgatgctgtccttgcgatagtgactgagttcttgcgaaatctggtcgtttaaaagtgtgtggcagctccctccgaactctctccctctctcacttgtgctttcaccatgctatgtgcctactcccacttcattttccaccatgagtaaacgctccctgaggcctccccagaagccaagtgatgtcaacgccatgcttgtacacttgcagaaccaagagccaataaagcctcttttctttacaaattacccactgtctgaggtattctttttttttttttttttttctgagatggagtcttgctctggctggagtgcagtggtgtgatcttggctcactgcaacctaggcctcccaggttcaagtaattctcccacctcagcctcccgagtagctgggattacaggtacatgccaccatgcccagctaatttttgtacatttttagcagagacagggtttcaccatatgttggccaggctggtctcgaactcctgaccttgtgatctgcctgcctcggcctcccaaaatgctaggattacaggtgttagccactgtgcccagccctgaggtattctttatagtgatgcaagaatggcctaattctcatgtcattctcatagcagtttttatattactcaaattagccttacatgcttttcagcatctcactttttctttttaggaagatttagttgagtgtgccagatattgtctgttggtatagagaccattctgacctttctgtgctcttctcagtatcacacgtgttggaagattgaaaattgtatttcccccagactccctggcaaaatgaaagttagctgggttgggcttgtgggaaatacttgcaagatattaaaagtgggagggaggggccgggcacagtgcctcaggactgtaatcccagcactttgggaggctgaggcagatggatcacctgaggtcaggggttcgagaccagcctggccaacattgtgaaacctcgtctctactaaaaatacaaaaattagccaggtgtggtggtgggtgtttgtagtcccagctacttgagaagctgaggcatgagaattgcttgaacccaggaggctgaggttgcagtgagccaagattccgccactgtactccagcctgggcgaccctgtctcagaaaaaaaaaaagaaaagaaaggaagtgggagggagggagacaaaattctaactctagcagggaagcaggtggggactgtgagtaccagcatcatcagcagttccagcagtggcaagcaggggtgatccccgctcagcagcagtggcggtgctttcaacagtttaagtggaagtgcctttagtccagtgacaagggactgtgggcttcatccgaggatgggagcagcttctaacactgggtcaaattctttctactctttgttcttacaacccttctaacatcttactaaccaattccctatacaaaatatctttctgttcaaaatctccagactggtgcttgctaacctgactaactgatatcttaattaaatagtcatttgtttaaaaaaaaatagcagagctttaatttcatttatatttatttgtcaaaaaatgagcattaaaattattttgaatatgaatgaaatttttaaccatagtggaaaaataagtttcagttttgaaaggaaaacttctcattttccattcaactgtattttattttgttttaaaaaataaatattaaataagtattgcttttatcaatttaagtgacatcaattgacatgtgttcccttaaacaaatttgcctattttaaatgccaacaccttttctctcctgaccatctctaaaagtaagtaatcatttctcccttcttcatggtcccactctacgtattttttctctttttcttgcgcataatgcttttccccctgatttttaacatctttttatcaacatactcaattcactcttaacctgaaaatatacttcgttatcccacttcctatcaaaattttaatgcttttctcttctccagtctgtgttacaatgaaagaaaaagaacttatgctcttaatcttgcccttgcatatcccatcttgtgtgtttattcctcaatacctttcacagtgtttttgaaatcactggcttcagacttccgtcgtgagcccagctacttgatcagtatctccgatcagggagcctcagagcatgtgttgttaacaagtcctccaggtgattcttataataatgactacattgtgagaaacttgaaacgtaaattctgccccaacctcctgactgtcattgcatctcccagattactaaccagattttgacagattttcaggtttcatacttgcctgacggacatgtttttttgttgttgttgttgtttttgacagagagtctcgctctgtcgcccaggctggagtgcagtggcgcgatcttgactcactgcaagctccgcctcagcctcccgagtagctgggactacaggcacccgccaccacgcccacctaattttttgtacttttagtagagatggggtttcaccattctagccaggatggtctcgatctcctgacctcgtgatccacccgcctcggcctcccaaagtgctgggattacaggcgtgagccaccgcgctcggccttttttttttttttttttttttgagactgagtctcgctctgttgcccaggccagagtgcagtggcacgatctcggctcactgcaagctctgcctcccaggttcatgccattctcctgcctcagcctcccgagtatctgggaccacaagtgcccaccaccacagctggctaattttttggtatttttagtagagacagggtttcaccgtgttagccaggatggtctcgatctcctgacctcgtgatctgcccgcctcggtctcccaaagtgctgggattacaggcgtgagccatcatgcccggcctgaccgacgtgtttttataccagctcccaccttcccattctcaaacactggcccccagctttctgactgtgccattttatcttctcaaatgcctttactcataaattgctcaaaatcctgttctttattttgatatttatgacaccacacaggttctcttagtagtatcctttcttactaggacttcaataactatcccatatagatggttctatagtccattgtgtgtgtgtgtgtgtgtgtgtgtgtgtgtctagttgcatgtgtagtcttaacttccaatgtcaatttccagccttctactagatttccttattgggaaaacacaagttagtcattcaacaaatatcagtggaatacagaaccaaggaccaaatacagtgcaaaacactgaaactttaaacccaggaagccctcaagcaaacatcttgttttactctatctccaccagaaggccatccttcttttacctcatttagctttctctttttctttttttttttttctgagatgaactttcactcttattgcccagggtagagtgcagtagtgccatcttggctcactgcaacctccgcctcccaggttcaagcaattctcctgcctcagcctcccgagtagctgggattacaggtgcccgccaccatgcctggctaatttgttgtatttttagtagagacaagggcttcatcatgttggtcaggctagtctcgaactcctgacctcaggtgatccacccgcctcggcctcctaaagtgctgggattacaggcttgaaccaccacacccggcctcatttacctttctcaattcaaattttatttctctcaacgtacctttctcagttcacagaactaccatcttcctagctgtttagattttacctataagaatcatttagtgctgtgctggtaaattttttaaaaactgcactcctcccgctccccagaaaagttctactttgcagtgttggacattttagtgttgtgcttattgacactatagctaatttaagaaacaatttgatatcactggacaggaatctggggagagatgcacaaaatttgaccttgggagctcacgtagaccagcctcagcacactcctggaatcaattttttttcttaaatatttatatgatatattcaatcatttaccaaaccacctttggattatgtacccaattacaccctttatattctcaccatcatggctgtcatgtaagactcatggtgcagtgctgccttttttggctatctgcccttgacatgtcatgacacatgtcctccaagaacaggtacaaccacatcactccatgattcaaaatgtttaatgacttccattagcaaacaaggtcgattttgcctggggcagctctaagtatgaaaatattggacaagataatggcatcaaacgacagactggacccaggaataaaaacaaggatgattttgtacttttgttaaagtaaatgaactattcaatatcttctgatgctttcttttgtgattttagaaatgtttcatattggcaagaaagtccgctttgttctttgtgtctttccagcttctcatatccattgcttacatgttattgttattgctgctaacagagtttacttagaacctcacagtatcttctaacttgactttattgtcttctctccaagtcattctccatgctatcgtcagagatccagtccctctccgtattgagcaactagtacctttgtcattgtatgagccatactccaagataggtctttcttgacccatttaatagatgagatgaatgaagcttaaagaagtaatctgtgcaaggtcacaaaagtagttagtgggaaactatctcaacttactctacctcaaaaacatcttcagtaggcccagcccggtggctcacacctgtaatcccagcactttgggaggccgaggaaggcagatcacgagatcatccgatcgagaccatcctggctaacacagtgaaaccctgtctctactaaaaatacaaaaaattagccagacgcgttggcgggcgcctgtagtcccagctactcaggaggctgaggcaggagaatggcgtgaacccgggaggtggagcttgcagtgagccgagatggcgccactgcactccagcctgggtgacagagcaagactccctctcaaaaaaaaaaaaaaatcttcagtagtaactcattctatatagagtatctgaaaggctcccagtacgacctgattccaaactacatttcaacctgaatttccactatttctctttaatactttatgctcaacccatgtaaacagctccctagtttgcatgcagctgccaatgtgaatacacttttactcataggagtcatcagatccaatccctttcaacatataactagatgaactccttcacttttacaccaacacaaggaaaactgccttcttcagaaagcatcctgattccttaagaaataacttctcattcctttttcttaaatgccatctatttttacatctccaataaagtttaatgtaatttcagttttgcattagtctgttctcacactgctataaagaaatacccgagaataggtaatttataaaggaaagagatttaattgactcacagttctgcatggcttgggaggcctcaggaaacttaacaatcacagtggcaggggaagcgggtaccttcatcacaaggtggcaggagagagagagagagtgtgaaggaggagctgtcaaacacttacaaaaccatcagaacttgtgagaactcattcactatcacgagaacagcatggaggaaactgcccccatgatccaatcactttgcactgagtccttttcttgacatgtgggaattgcggggattacaactcatgagatttgggtggggagacagtcaaaccttctcaactttatattgtaatattaaatataatgtgtttcaatgtataggttgtgggtgcctagagtcccagggtcctcgtatcgagtcgtattggtttgcaatgctgtgtgacaaatcaccaaaaacttaaaagcttaaaacaattcccagtatccatggggcaaaaatccagatatagcttatctggattctctattcagaatctcacaggctgcaatcaaggtgtcagatggtgagcaggtcttatttgaggttctgggtcctcttttaggcttacatggttgttggcagaatttgttttttgtgattgtaggactgaaagccctcagctcctaggtcttctgccattccctaccatgaagcttcctgatcaatgacagtttgcttcttcaaaagtagatgacagtctccaacttgttcctaatctctgtatcctcttttaataggctcaactatgtcagatttgtccatacccttttgatcaaggtaccgtcaacttgatatctgcaaaaatctgttcatgcttgccacataaaataacatgatgacagaagttatatacgataattggtatcatgatctaatagttaaaactaaattacagccctgaccacattcaagatgagagggttatatattagtgtgggccattgagggtcattttaagactatatctgaaatgccaacctagcctgatgatgccttactaagaaatgattttaagttattgggtaataattgtgaaatttatgaagtgacagtataatacatctcctttgcaataagttaaaacattttatatgtgacaaataatagcttattgccattgaacatattaaaataaaagtaaaaatattgtgaattttgatggagtctattactcaagtactattttttaattaatagaagtaatagcaaaaccaaaattattttttaacttttgtttgtagttcagtggtacaggtgcagttttgttatataagtaaattgtgtgtcacaggggtttggtgtacagattatttcaccacccaggaaataagcacagtacctgataggtcatttttcaatcttcaccctcttccatcaggtaggccctagtgtctactattcccttcttcgtgtctatgtgtattcaatgtttaactccaccttacaagtgagaacatgggcatttggttttctgcttctttgttagttcacttaggataatgacctccaactccaaccacattgctgcaaatgatatgatctcattcatttttatggctgtgtagtatttcgtggtgtatatataccatatttcttttgtccagtcgaccactgatgggtatttaggttgattccatgtgtttgctattgtgaatagtggtatgatgaacagatgtgtgcctgtatctttatggcagaacattttctattcctttggatatatacccaatggtgggattgctaggttcaatggcaattctgttttgaattatttgagaaattgccaaactgattttcacaatggcttaaataatttacattcccaccagcagtgtataagcatttctttttcttctgaatcttgccaacatctgttgttttttgactttttaatattagccattctgacacgtgtgagatagtatctcattgtggttttgatttgaatttctctagtgattagggatgttgagcattttttttgtatgcttattggccacatttatgttttcttttgaaaagtgtgcattcatgtcctttacccactttttaatggggttgttttactcttgttgatttaagctcctgatagtatctggatattaggtgtttattggatgcatagtttgtaaatatttccttcccattctgtaagtagtctgtttaatctgttgatagtttcctttgctcttcaaaggcaactatttctggccgttacgtgctttattttttttaattgtaaaagtggcaatttttaatttacaaaatagaacaaagaaacacaaaatagggtcatctatgtcaagcaattaataatttcctaaagaaagatcaacctggatttcagaaaagcacactagtcaattacagatcgacttgcccaaatgatgattaaaggacaatatctggaatataggttgcagaatgcctctcaaatatctgagattcacacattccagaataccacgaaaactaaacaaacaacaaagcaatacttaaacatccgagatttcccagagcttgtataaaatagcatgctaactcactctggaaagcacaggctgtttatcctttcagatacagaagaaaaattgaatctgttaactgctctgtctcttctatctccccctgaatgatctccacatttaagaggtttttgctagaagataaaaaagcatccatgtggatatcatttaataaagactcctaattttgttccataaaaaagcatttgacttcagaaaagttgttatgttttcaaattgtaaggctgttagtcacaagcacactaagccaaatatatcaccaaggaagggattaggtgcctctacaagtgaaatggttgaaatttaaaatattgcaaaatatttgaaatgaatgtttgaaaagaaactatcaccagagtaaacattctctaagacactcaaaccagtttacccaacacttatgaatggcattccacactgatcactggtaaatctctgtatattatggcttttgaacccaaacaccttcaatttttcttaatactctgtgttctgtcctggcattccattcttacacagaattaaagctatatgtggctgaaagtgatctgaagtagctttattgtggttagattgcacccaaattagatgaagcacaacaaatttacaaaaacaaagtagaaaaacagactcctttatttttgaatgaccgatcaaagactgtagagacattatagacccatgtaaaccaaattctgtaggagtaattatgtataaaagagcttccaatctacctctccgttctgagaaataaaaggcattgctcagataaaatgcagaaagtccaacaactgtgctatgtaaaaacctggaggacatctgggctctgagtcttaatcaatttacaataatagtctttcaagtcaatctgatcagtggctttgagttgatttgtattgtttgactgctggaatctctatttttggatcccaagggcatggtgatgtctaagacatcagtgtcctctgaaaataacatgggtgctggcaatgaccggacctcaaacattaaaaaaaaaatggcgattaacaatttcccatacacttgcaaacatttatgacatgttctttcatcattccttgtgaatgaaatatgaaaatatagaaaatcctaccatttatttaaccccaaattactccagtcagattccttttatgaagattacagtgcagataaaaatataaaaagcttgagggcagtaaggatgctatataattctacctgtagatctttcctttcctaagtagtattaatcatttgtgctgtacttcatatacagacctcacgaagtcaatctccctgcctctttgcacattgctttgctttgactagatgtggacttgtgactaggtcttcctgatgaagtttgagggtagggggagactccaagctcccttttattctagcatgtcaatcagcaaaatcggcagcaagaagagactgacatgagtagaaccatgcttctctcaatatgagattgacattagcttacataggaaataatagatagtattttaagtcactcaagactttgaggttgcttattgaagcacaatggaaatcaaactggctgacacaattttcgtagcagaaacttaaaaattattgtcaataattctgataatagtaatggcttagagaaatatggatataaaagatacatcttatacatgcatgattcatagttaaggagcctagcttttcctcaagtataaatatcaatgcaagcgtcttactagtgagatttgtgtttgcatgattgaacacaaattgaccctgaatccattaaacaatttcttttatttttttctttctaattccacttattctttcatacatttaagtatattgattaatcaataagcatgttgatttatagcacagattttaatgacatacaaccttcagttgatttagcacgttaaactatatcacatattaaccaattgaagctccatatatgtagattgttttattattaatatataattgttatacatatttttggagtacacatgatattttgatacttgtatataaagtgtaatgatcaaatcaggtaactggaatatccgtcatctcaaacccttatttttttctttgactcgaaaacattccaattcttcccttctagtgattttaaaatatacaataaattgttgttaactacatcttccctgttgtactattgaatattaaaacttattccttctgtctatacatctgtacacatgaaccaacttcttttcaatctcacccttccctacccttcttagcctttggttaccatcattctactctctatctctgtgagattcacttttttagcttccacatataagtgaaaacatgtgatatttgtctttctgggcctggtatatttcacttaacataatgacctccagttccaccagtgttgctgcaaataatagaatttcattctttttaatggcagaattgtatcgcactgtgtatataaacatcacattttctttatccattcattggttgatttaaactaagattgatttcatatcttgcctcttgtgaatagtgctacaatacacatgggatacagacatctttttgatatactgaagtcctttattttgttgatgtgcctagcagtgggattgctggatcatatcataattctatttttagttttttgaggaaactttatactgtttgtatattggctatatttatttacaattccaccaacagtttaggagtggttccctttctctgcatccacactagcatctattattttttgtatttttaataaactatattagctggggtgagatgataccttattgttgttgtgatttgcacttcgctaatgattagtgatgttgagcatattttcatatacctgttggcaatttatatgtcttctttcaagaaatttctactgggtcttttgccatttttaatagggttgttatattattattattattattttgctattgttttagttatttttatattctgattgttaatttcttgttggatggatagtctgcaaatattttctcccattctgtaggatgtctcttttttctgttatcaacaacagaatgaagcatttattcaatggtttcttctagtagtttcatagtttcgggtattatatttaagtctttaatttattttgatttgattttcatatatcatcagaaatagggtcctagtattacttttttgcatatgaagatctaatgtttttccacaaccattaatgaagggactttcctttccccaatgtacatctgtggcattgtcaaaaatgagttggttgtaactgtgtggacttatatttgggtttactattttatttttttgttctacatgtctgtttatatgagagtaccatgttgttttggttactatagttttgtagtatatttttaaatcagataatatgatgccttcagctttgttctttttgctcagtatttctttggctatttggagtcttttgtctttctatatgaattttagaattgaatctgtaggttgctttgggtagtatttacaaaattaattcttctaatatatgaatatggaatatctttcaattttgtgtgtcctcttctattttctttcatcagtgttatatagtttttattggagagatctttaatttctttggttaaatttatttctaggcattttttgtagccattataaatgagattgctttcttaattcatttttcagtttgttcactgttggtatatagaaatgcttttgatttttatagacccctaacaacctcttcctcccaactttacatatgcttgtcatgctttatgagcaaatataatgctgtaccaaagaaaaagcccatctatctaccttatcaacttaattaatctaccagagtagatatgatactgttttgaaaggatgtgatgaactttagctttctacatatttcagtgattacttcaattgttatacaaaatatacattgctttttgaaataaataaaattcattttaaaaagttgttatttttcaaaaactaaactaagttttataacatattgaaattaaattaaattaaatttaaattaatgttaatttccatcatatgtgaaccacattatatagtaaagtaaaaggtcaactaatgtaggagtaatgtttcaatgatgaatacagttcttagacttaatagtgaaagcatatctaatctagtattctaggaatgcattacaagggatcagacaaagggaaaagaaggcagcacaatattttaaaaactatcattaaatagacatttaaaattttgaacacataaaaaaaatcctcccaaattaacaatagcagctttaaactattagagggagggagagggtcttgccttatgaactgggaaagcagaggaaggagcagtataagattgatggttctgttttgaggtaagcattacaggatattcaaacattgaagaaacttacaacagaaacttgaattcagccctgtcattgaagaaacttacaacagaaacttgaattcagccctgtcatttttcaccggtctccccaggaaagcactgacctgcctagggagtgaggagaaaagtctcctgagaaccattctttcacatgcataacccctaaaataaaattaaacacactttgggaggccgaggagggcggatcatgaggccaggagtttgaggccagtctggccaacatagtgataccctgtctctactaaaaaaaaaaaaaaaaaaaaaaaaaattagctgggggtggtggtgtgcgcctgtaatcccaactattccggaggctgaggcaggagaatcacataaacctaggaggcagaggttgcaacgagctgagattgtgccattgcactccagcccgggagacagtgcgagactccgtctcaaaaaaacaaaaaaataaaaattaaacaacctttactttgaagtcagccatacttgcaatccctaatttcagtggattgcctcaaaatattgcccatttggtttaaacttatttcaaaatgtaaaaatatgtcattctgtcattaaattttgagtttacacataaacttgaacgaacaaagtgtaattggttgctagatccatattcttcagatatgagatcatgacaaagaattaaaaatcctaagattgtttaaaaagaagattcagaataaaataagttaaaaaccaatgacaaacatgaaatctttaatacttttgaccaaggtcaattttagagtcattgattatttgaaccaaaaacttcatttgaaaaatggcagaggaggccgggcgtggtggttcacgcctgtaatcccagcactttgggaggctgaggtgggtggatcacgagatcagcggatcacgaggtcaggagtttgagaccagcctggccaacgtagtgaaaccctgtctctactaaaaatacaaaaaattaaccaggcgtggtggtgagtgactgtaatcccagctactcaggaggctgaggcaggagaatcacttgagcctgggaggcggaggttgcaatgagccgagattgcaccactgcactccagcctgggcgacagtgcgagactgtctcaagaaaaaaaaaaaaagaaaagaaaagaaaacaaaaatatcagaggaaatacactggggaaaagtaatgaccaatatctgccatcttagcatagcccacaacaaaatcagatctctcatttatttttcttaacagtatctgccttcagtttaagaataatagaagtttttctgaatatatcttttaatgtcggtcttgtctattcgtttaacttcacaatgatataaagtttcatggtatcttttactttcctctgttcccttcaccccaaacacgctatacaaaataaaaccattttttatgtcttttctaataagaggttatatacaatgtcaacacctgcatttttatgttagaggttaaatcagaacttagggttaacttggagcacttcctgtcaccttagtggtggggtgcctcttttgaaaacagaataagacaacttctgattccaactctgcatactgaggagcaactgatgatttatttctgtgtcccaggtcccagaggaaggctggagaacagtcaagttgttgttcccgacatcagtggttttggcaattatagcataagagagaaacagtcacaagttgaaaacataagccagtttacttttttaaatattgccacaagaaaataactcacctattaataaaaaaaagtggacctatagttaaaattatatttatagcttgatcttgatattgtcttttttcctaaaagaatgttttccatataatttactatagtgtttctttgaaaaaatattaaaaataattaatttatatatttatgcaaggaagttgaagagctcctgctcaaaaatggaaattggtggctactttgtattgatgaatgtgtagttatagtatttaaaatatgattccaaagactgcataagagaaattaaaatttgatattaaaaatgggtaaatagaagtatttcaaatttattttctggttgacttcaaaataatacttaaaagttaaaactaaaatatggcttttacttcatcatataagcttatgtttggcttaaaaactggtaaattctattgaattataaaatttgtgtcttgttctgttaagttagccttggcctcagagcaatagtttgcataagcagttggaagtgttcactttttttttttctaaatctgaggtcactcttccgcccaactaactaaatttaatgttgaaacctgtatttaactgttagtaactaaatacacaacagagttttcagtcatctaacacttaatattaacttctcaaacagttggccttaacatcataatttgaagcccccaaaaaatggatttttacttaatatctttcaatcaatatccagtaatatcattgtttgagagaacctggattttgacagttcctcaatactatgtttcatatgcaatggaaaaatatgatattaattgacagaaatatataaaatccagatagatctgatgtgcaaattataatttaatgtcttaattgatactttgaaataattttatttacctcaaatactatactcataactatctcttctagaatcagagaaaacataagaatattttctggtttattctagcccttcaataaatcgattagataatcctctattcaacactggacctatggagggccaatggagcccctccaagtaagattgaaatattccaaataaactaatcctacgtggatgcaatctttgcactcacaatttgtaaactttgaattgatattagacattagaacacagtagtacgtgttacaagctgcctctccaaaatcaatgccttcactatagaacttgcctgaagcaatgactaaaaccaagattatctctgaaccatcagagatagaaaattctgggatgatttctacgttttgtgtttttggaaggatgagttattgtgtctcattatagataatgagactcattgtttggacggcaagttatggaacccatcaacatacaaattctatggtgaaaggaaccattactttaagtgacttatgtgccacttactgagtcaaattaaatgataaatcaactgctaaaagaaaaaattgcacaaactatttataacctgaaacttggggctcgactcactgatatgtaagacttatctgcccaaacactaaatttcttgctgttaatgcatttccttgtctatccacatcacttcttcatctcattgagtctttggttttcagacactctattattaacttactcatcatcatttctactctcataaaaagcctgttttcattgatagtcactgaataaacacatactgaggacctgccatatttcaaaggaaattcacaaaggatgaaactgacaagcaagaaatgcacagggccctaaggtgacttggaggctttcagattaatgctgtggtaagagatgacatcacattttgagaaatgacaagcttccactaagagttaggattttctctttgtactcctcctttcctacctgtactttacaattggaataatgaccaagaataacatagaatgaaacttggcttcataaataataacaattgaaaagaagcatttatagaacatttattaaaactaagtaggtgagcacaaactgaatagttctacttaaaaattaatagacagatatgcttctgtatcttggtaacagatgtcttaagttaaattgacatgacatgaattgtactttcagttacttcaatgatggagtatccatcttttaaagattactctgcattggcaccttcaaactaacttggcattgttcctctaaatgtccttggctcaaaatgttttacaataaacttctaagccagtgcaggcagaatcttggcttttatgggatctgcctctgcccacttcaggatacgtgttataataagcagacacgctgttttttcattattaataatttagcatattctttcatatctaccaaacatcaacgtttaattccaattttattttgtaaacacaagtttatgtaaacactttttaatacctgagaatttgccttgcctttaaaagcagaagcacagagaaaagaagaaacaagatgaaggactaggtcaaaatgactacaattaaaggcattgaaattacattgccaagcttttttgtttggtaattatctgctttgtaattttgggaaaataatctccctcttccaatattatgtattattaaatggtaattttatatagtttatttcttgagatgtttccttagtcataatagaagtgaaaaagttcaaatgcttaatagcatttcacttttacattttttatcatcatactttttattttttctctatatctgcgtaatttcatttatttttatacaaacaagaaaatcaccctgctttatggaacttctgagtatttaattcatctttatatcaacttattttatatatgagcaagtaaaatgcaaatatagaaatatgtgccacaattagacatcatttaaattatatttgaatggtcagattttttttgtctcactaagcatgaacaaatgatggtgggttttcatagagaaggtgtctgggcattgcaaatgtgcagagttctgacagttcaaaggcctgtgccattgggaaaagctaaagctgcccaaagtcaattatttactcctcagcaaagactgtaaagaagcacaatgaacatgatagtggtctgtaggcctagttgtgaactaaaataacctaggaaattttaacagtctctgatgccaagtcttattgctaaactctgataattgctcttaaattcattaaagaatatgacacttgaaataaacttggaggtatattaaatacatttactgttaggaagaatgatgtggaattggcaacattttattatgtgttgaaattaaaaggcaatttctagttaatgacattttatgcaatttcatttctcaacaggggcctagaaaatgagggcaatcttacaacatttataaacatgtcgttcgcggttaattcttaaaatattttttattatactttaagttctgggatacatgtgcagagcatgcaggtttgttacataggtatacacatgccatggtggttcgctgcacccaccaacccatcatctacattaggtatttctccaaatgctatctcacccctaggcgtccaccccctataggcactggtgtgtcatgtttccctctctggtcttgtgttctttttgttcggctcccacttatgagcgagaacatgcggtgtttggttttctgttcttgtgttagtctgctgagaatgatgatttccagctttatccatgtccctgcaaaggacatgaactcacccttttttatggctgcatagtattccatggtgtatatgtgccacattttctttattcagggttaattttatttctccattgagttaatcaggcatgtctttcctgaaattaggacttgtctatgattctgtaagtgtacaataaataaattttaaaatagttttaaaaatcactacattaggaaaaaaagagataaattaataaagatgaaaatttaagtcattgagtcctcctgtagtatctattatggtattcaaatatatataacttgaattgtactgaaaattcaaatgcatataaaaaattatttaagagttggaaataagacaaaaattgggtgaaatagtttttttcagttgtttagtgggattgtttagttttctaataataatacagttatgtttgaaaatgatttattatttgctcagaagctactatgaaattacatattaactttaagatttcttcctaaaagagattatattcctgaagattatgtgtcattgtcatttcacatctcccatagaagtcttatgctaacattcttttctccaaatgtctagaaatatccagtttctcaaatatttttgacccatctttatcaacttaactggtctgtcattaatcagttgaatacatttttggcacatgtctattctgtttctatgtgaatctttttttaactttttgaaattttactttgaaaacaatgcctatgtacattgccaaactatgttaaaatgaaaagggacaattttctcacatcttaacaggcaatatacacaggcattcaaaagattctaatctatttaactatttattattatattgataagagcatttttgatgtacgtgcatcactgttttatttttcatgtatttcaatataatttaaaacatcattttatcttttttataaaaaattagatttagtattcacaaggatgagaaagaagttttacagtcttactgggtaaccaatattcactcatagatatctaagaaaagcattgctataatcaggtcataaacaatcatttagtcaacacgtccatggctctgcttcagtggcccaagtctatctgggagtcataagcaaggggttcccgacatgcttcattttgggatgaagaggaaacatttttctagtttgggctttactatattgaaatcaatacactgaaataagtcttttaaaatatctcaagtgtcctgtttattaaaattcattgagcgtttttttaaactatttttctcagactatttttttgttgttctgctgtgtgtgtgtattttttattttattttatttcatttatttcatctttttttgagacggagtcttgctccatcacccaggctagagtgcagtggcacgatctcggctcactgcaagctccgcctcctgggttcatgccattctcctgacacagcctcccaagtagctgggactacaggcgcccgccaccacacccagctaattttgtatttttagtagagatggggtttcaccatattagccaggatggtcttgatctcctgacctcatgatccacccacctcggcctcccaaagtgtcaaactatttgttttatgagatactaccagtcttcctccttaaacctctatatctgatctctcttacatttttctactgtggttgtccatctatctgtttgtgtagcagtgtctctatttgtgtctctttgttttcttttagttccatatctttatgttattattatgaccatcattatcatcttagtcataactaccattaataaaccaataattgtgctagaccccttatatatatatattaaaattgatcttcgacatatcactgcaagatatatgtatatgcaggtgtgagtctgagtgtatataaaataaacctttttagatgagataccatgctcaaggagattaaacacattgctcatgatcacgctgctaaatatctactagaatatatctcacagtggctagaaaaaaatgggcctactagggctgtgattctcaaattttaactgtgcatgcaaagaatctggggatctttttaaaatgcagattctgatgaaacgagttcaggtggttgcctcagatactgcatttctaacaagctcctccataaaaccattgctgctaatccaaagcccatacttgaagtagcacaatacataggagcaatagatcaggaaaactgccctttgattcaaacctgaagaagtactcaggagtacactgttgttactaattactcagccttggttggtacgttgtcaaagatcaaaaaacatttttaaagataaaaaaattattggaaggtgtgtaatgaagggttaattcttcagacatggctttccaaaaccttgcacattccaaaggtcttcgggactggctctcgacaagctcctgggagatgataacctatgagcccttggtatatgctgcctgatgagagtcttcgtatacctgaaaacgtaggtcataccaaatagctgatgctaacaacgtgatttcttgtgagcacctgtttctgtatgcctatgactttgtgtaatgccatattaatatgacctctcttagggcatagggaggttgggaactaagtagctaagttcagtcacaggacgctcgatgcatatgtggtggaatcctaataaaaaccctggactcaagactgactgagcttccctagttggcaacaagttcacacatgttgtctcacaccactgtaaagaaaattagtcagtgtgaagtccccactatgaaaggacacctgtaagctcacatctggtttgtcctggactcaactttatgtgctcttatgcttctgattattttaatctggtttctttcactgttagaaactataaccacaaaaaaaatcagctttcttgagttatgtgaatcattaaaccaaagggggacttggggacctccaataaaaagtatatatattcttaaaaagaaaaagaaaactggctatagcagatattgttgatgacttgtcttctatgtcctggactcaatgtgttcacctgaaattcacctgtttccagctaactgagagctccccacatcatgcctgtctttctgatttttgggcctcctggaagcttcttgagggtaaccagtgtttctcaaccacacataggaacgaagaaggagttaggggtggagagttaatgattctaaggcaatccttaagcaataagagatggggattccagcatccccatctctttgtaaagttattttgagacaatctccatacctccgtcattactgagcacatagcagtaactacttattcacactggcttcgtgttctgtttcattttctccacttccgtgctttctcactcaatttctgattaaagtatctgaccccaaatatttgtttcatagtctatttttgagggaatccatagccaagacaataacaatgggagctttgcaatgagggagggtgggtataatcatcagaagggtacctacctcactgggaacatgaaggccaggagagcttactgtttcattgaaagaaacatgttgaatctcagttgaatacctatatatatatatatgcaataagtcgtgccctttacttatatcaaaggaaagtgctctttacctctctttgttgttgtgtttttatcactattgcctacacaagcagaatatcatacccaggatttaaagccctgtctgcaggattttcaagctcatgtttttatcataagtcactctgcttccatgtgttttaaatctaatcctcattcctctgcttttacaccagagaattcatcactgacttatttttgactgacctccttatagagctgtcaagtacacaatttctgctgtgacctttctcttagagttcagtcatatagcctctcactagagatcatctcctcttatctttcctaataatgaattgtcagttaaaactcaacatttttaagattgagcttaccatctgcacacacacacaccattattggtgtattctcatagccttgaaacactaatgtcatgttgatgtctgccttttctttctctgctacctcatccctcatccttagattattctaaaagattcaattagatcaagttggctaattatatttttcagatcctctctacccttaccaattttttgtttaacaaattttataaatttctggcaggagactgttgaaatccccatggatgactgtggttttactattttacctttcagttttaataggttttatattatgtatgttgaagtaatgctattgtgtgcatacatatttattatttacatgtcttcttgttgtattttcccctttgtcattatgaaatgttattcttcatccccagtgatatttcctgttctgatgtctactttgctcatcacagttttagtgggttttggtttgtttgtttttctttttttgggttcaagtaagtttcttataaagagcatacagttgagtctgggtttttaatcctgtcttatgatctctgccttttaataagaatattttgtcaatttacatttaatgcaattatcactatgattgagtgtataactactctcttgctatatgttttctaaatgtctcatcatttttgttcattttccccctttttctgccttcttttgaattgagaatttagtttttaagatccgcttttatctccactattaatttttaaccattcatttttattttaattttaatgattgatatagggctcataaaatagacagttcttgttttccttagttttgatatgcaaaggctttagttatcatgctttagttacatagcacaagccccaaaacaaaacagtttaggtacagcagtgtattaattgggactaacggcttgaagtacaaattttttctgtgaactcttcagtccataaaactattaggtaaatatcagatttgcatcaagatccatggttagtcatgtcacttttctcaatatctatcaataatcaattattatgtacctgttttgtattcatacagagacaggaaagcatacagtagtgttgcttctttgtctttcagtgataaaggcatgacattatacaaaaattgataaatgacagaaaatcagccaacgaaaatgaaagtgtggcaaataaatgaaagtgtcaacaccgaaagtgaaattcaaattggatcttgatggatttatagaagcaatagttaattgcgagaatgctgacacaactaccatccaagagatttcatatgtgcagtcatgggaacttatggaagacatatttacaacttaaatgaagaagctgattgcagggaaaagatgaaagttttcccagaagatgtgatgctgaggaaaaaaattacattgaagaaactctccaagatgtttaaagacaatgaacgcacaaacaataaaatgttggacaaataatcaaagttataaagaagaatggcaattcactaaagcataaaaaatattgagagtcacatgatgagaagttgtgcaaatactgtacaaactactctgaatacatttcaaagaaatatataaaacatgtattttaattatcaatgttttaaattatagtgtactatatagatactagtttcagggttgttttttggtttttacttttctatacatatataacagtaagacatttttaatattttgacaaaggtgtttatttatttattcttttatttagagacaagacctcactgttgtccaggctggagtgcagtggtatcaaaaaggctcactgtagcctagaccaccaggctgaggtgatcctcccacctcagcttcctggatagctgggactataggtacgtgtcaccactcctggctaattttttgtagtttttgtagagacagggttccgtcatgttgcccaaactgttctcaaactcctgggctcaagtgatctgcccaccttggcctctcaaagtgctggaattaccggtgtgagccactgcacctgactgacaagtgtttttaatgattgcaggaagaagtttatgttttcccattaattattaagataactttgcccagtttcaacttgcacagtggttactaaggccccacactgatgtgcataaagagtaccatctgtactttttttttaacttaaaacacacaaccttcaaataatatttataatacctgctatatagttttaaaatattgcaattctgaagccagcattaccatgataccaaaacctggcaacctataatcctgaaatgtaagacctcaaactataagaatgctagaagtaatcctaggaaacaccattctgaaaatcagccttgggcaagaatttatgactaagtcctcaaaagcaatttcaacaaaacaaaaattgacaagtgggacctaattaaactaaagagcttctgcacagtaaaagaaactatcaacagagcaagcaaacaccccacagcatgggcgaaaatattcacaaacaatatgttcaagaaaagtctcatatctggaatctataaggaacttaaacaattaaacaagcaaaaaatgaataacttaattttaataatgagcaaaaccatgaacagatacttctcaaaagaagacatacaagtggctaacaaacatgaaaaaaaatgctcgtaatcactgatctcagagaaatgtaaatcaaaaccaaaatgagatatcgtctcacactagccagagtggctattattaaagaactccaaaaatgtttagtaatatcttttattgaaaagttcctgccaaggctatagaaaaaggggaatgtttatacactgttggtgggaatgtaagttagttcagccactggggaaagtagtttggagatttctcaaagagcttaaaacagaactaccatttgacttaataatcccatttctggttatatatccataagaaaataaactattctaccaaaaagacacatagacttgtatgttcattgtagcactgttcccaatagcaaagatatggaatcaacctaagtgcccatcagcagcagattggataaagagaatatggtacatatacactatggaatactacacagccataataaagaacaaaaccgtctatttgcagcaacatggatgcaacttgcagccattatcttaagcgaattaatgcagaaacagaaaatcaaataccacacgttctcacgtataaatgggagttaaacacagggtactcatggacataaaaagggcaacaatagaaactggacactgctagagggagaggaagggagggagggagaccggggttgaaaaactatctgttgggtactatgctcagtacctgggagatgggctcaaccgtaccaccaacctcagcatcacacaatatatccatgtaacaaacctgtacatgtattccataaatttaaaataaatgttcaaataaaaaaacaaatattataactgtctatccattttctctctacagttctttgccctactgtcatagggttttcctcctttctttatatatattttgaataccacagaaataattattattttggttttaaataatccattacctttaacattactgaaaacacgaaaaaaaatcttttctatatattatttctttttcctttttttttttttttttttgagatggagtcttgctctgttgcccaggctggagtgcagtggtgcgatcatggctccctgcaacctccacttcctgggttcaagcgattctcctgcctcagcctcctgagtaggtgggattacaggcgtgcaccaccacacccagctaatttttgtatttttagtagagacagggtttgaccatgttggtcaggctggtctccaactcctgaccttgtgatccgcccgcctcggcctcccaaagtgctgaaattacaggtgtgagccaccatgcatggccctatgtattatttctaacatgagtcatctctttttaaaaatgtaaattatcccagcaccatttattaaataggaatcctttcccccatatccaaggatgatagactggattaagaaaatgtggcacatatacaccatggaatactatgcagccataaaaaatgatgagttcatgtcctttatagggacatggatgaagctggaaaccatcattctcagcaaactatcgcatggacaaaaaaccaaacaccgcatgttctcactcataggtgggaactgaacaatgagaacacatggacacaggaaggggaacatcacacactggggcctgttgtggggtgggggcaggggggagggatagcattaggagatatacctaatgttaaatgacaagttaatgggtgcagcacaccaacatggcacatgtatacatgtgtaacaaacctgcacgttgtgcacatgtaccctaaaacttaaagtataataataaagaaagtaaattatcatcctgttactttctttttgtctaccatttctttcagtcccagtatgctgttgataaaatctatcagctacttattgtcaaaatagctttatttgctttcatttttgtaaatttcttgatttttttagaattttcacttgaatgaatttccaggttgacttgtttctcttgctttaagtaatagaatgttgcgctatggtcttctgatatacatgcttatcataaaaagtagttattacattggttccattgtcaataatacatctctttttctccaactgtttttaagttttctttttaaaaatagctttcttcaacttaatccttttattcattttgatttgagtccactgcacttctgttacctgttggtttatagttttaccaagttttaaaaatatctcaaccactacctttataaatagtttttgccctccccccatttcctgggatttcaattatgtgtgttgttaagctgcttaatattttctaattccataatttctgtcttttcttggtctgtttctattaactttttgtcttgttttggatctttttttgtttatatgcatttctgtttttttttttttaatgtctaagggaaattctgaattgtacgttgttaggatctggattttgttttatttctttaaagagagatgaactctgttttcaaatgcagttaagttatctgagatcaatggtgatattttttgcttttaaatgtgattataatggcttcagagccttgactctagagctgattcacccccctactaaggtgtgattattctgagaactctatcggatattataagtttctcactctggctggagcacatacgggttcttctaaggcccacatgacctccaggaatttctctggcccactgctaatgaagactcatttttctatctcatggagttttcctttatgtaggcacagttcagttctcactcaaggactccagagaacctctatgtaaatctccacagttctctctctgtgcagccctcttctctctgtcagtctgccttgatgattctagtcaccttggcctccataaactttgatatcttgctcttaaattcagcaaatcatgatattctctctcagattgtctcataccatgctggaggctggaaatcactttcagtaagtatgctggcacaataaagggtatatattgttttctttctctcagaaatcacagttttgtgctgcctatttttttcatgcaataaaaacagtttatatacttgttctggatttctaaacgtttacaaaagttgcataattctggtagtcattaattcttcatcagcaacagttgaattctcagagacttgtttaactgcccagatgacaattatcctattgctttattcttcaaatcaagtaagtgaatcaaagtcagtcttagtgatgatcagtatctctatatttttgtctaaaaaacagaatgctattttaatctatagattcaagtgtcattttatctctttgaagttttcaacaagtaatgtttccggtattaacgttctttcttattcttcaaaacatcaagtaggcagaggttgagtctccattgtcacgcatctatatttaccaacgccgtattaaggatttttattatgcctttgtcttttcatataatttacttttgtgtggtttctactagatattcactatttttctggatgtaattgctgatgtatagtgcctatgtatttctttcttacataattccttagttgttcacttcaatttctaaattgagattaacttcaatttgtcctctgattactttggtaattctacttgtgatgcagttttagcaactgtatcttgtttatgctttgtgttcattttcatatttagaaaatagaacaccaggcatatatattttactgatttttttctctctgcattccttgtagaacagatccaggtattagctaagggatcctctggggcaggagtggtgtggcattgcagtttgtatctttttttaaatccatgattttgtaatggaataccgtcacactaattttcttactccctaagtactgggtaattgtttctcctcctattagcattcacttttctaaaggtaatgtggctcggatttagattcctaggtttctaaatctacatttctaatctctatattatcacatgctggttaatgcttttctcttttgctcctctccacttctgtgagcttcattctgtttggaactcagagtatatgaaatgaatagagtacatcagcctgaattctcttacaacttcaaattctttccattttatggatagacaacactgagttactctatagtgactttcctacttttattaatatcatggtcacattattccataaaatcttaccattttaagaaaaatagtttttgaattacatctcccagagtagcagcaatgatatctagaaaaagtgatcatcctgaacatgtactgattatacatgtaaaagcactcactctgatcactccttgttttagttgaaatataacagtgtttggcaggtttgcttctccgtttatggtttcaggctatagttgtttctctgaagatgcttatcttcttattttttcttgttttctttttgttctcaatgaaatgaattttaatagaagaatgaaatgtaaaatattcaaattcagtgtcttatagtgtctatagttttgggcacttattttaaaactgaataataattttcaatgcatatgactcattctctaccctcctttcttccattcttctgaatgtgtgacaaacaagtatagatgctctgaatggtaataaattaaaaaatcatttcatgatggtcctattcctgtaattctattttccaattgacctccatttcctatcctaactgcataaaagtgaaataaatcagtaactatataattttaaaaataagtggtctgaatgattttgctgggataagtaataaaaaatgttgaaatctttgaagttttcaatttgcttaaaaagaaaaaagtttcaggctttggcaaagcaaacatgcattttgctaagtaatattcccccttaattttgagatttattttggcttcatacatttctttcttatatgaataccattaaagtaaaagttatttcagagttatcaggttgaagacttttatagatgtatgtgcatgcatatttattctttcctaaaaatacagttgttttagtttgggctgccagagcaaagtaccatagactaggcactttgtaaactggatgggtttataaacaacagaaatttatttctcacagatcttgagttcagaaatatgagattagagtgccagcatggatggattcttgtgaggaccctcttctgacttgcagactgccgtcttttctttatatcctctcatgatagaaaaagagcaagagagttctctggggtcttttttataagggtgctaatctcattcacatgggctccagtctcatgacgtaattagctcccaaagaccccacctcctagtaccatacattatgggttaggattttgacatatgaatttgggtgggggagaacaacaaccattttgtccattgcaatagtgaaggtgaaggagatataaaatgaaataagtaaatcttccataaatctttcataaattatagtataagaaaatatcatgaatggttcaaatttgtgatttttatcactacaaaagagattatgggactgtgatatgatctggctatgtccccacccacatctcaccttgaattgtaataatcccaaaatgtcaagggtggggccaggtggagataactgaatcatgggggcggtctcccccatcctgttctcatggtaatgaataagtctctgttggtttcataaatgggagttcccctgcacaagctctttttcctgctgccatgtaagacatgcctttgctcctcctttgcgttctgccatgattgtgaggcctccccagccatgtgaaactgtgagtccattaaatcacttgttctttataaattacccagtcaagtatgtctttatttgcatgaaaacagactaataacagactgattcatctgactcagaaatatttgaataggacatctaaaaagggccttgcaaggtatgttttatgtgtattgatgaagatggatggagttttcatgaaagttacacgcaaatgcacagaccagccaaggtgaataatgaaagaaataaaaattagcagagatggacagaatagaaaccaaacacgactcatttatttacttctctttaaagtgccaaagcacatacttaatttttttttttttttttgaactggagtctcactctgtcacccaggctgcagtgcagtggcgcagtctaggctcactgcaacctccacctccccggttcaagaaattctcctgcctcagcctcccaagtagctgggattcaagcaattctcctgcctcagcctcccaagtagctgggattcaagcaattctcctgccaaagcctcccaagtagctggcaccagccaccacacctggttaaatttttttgtatttttagtaaagacggggttttaccatattggccatgctggtcttgaactcctgaccttgtgatctgcctgccttggcctcccgaagtgttgggattacaggcatgagccaccatgcccaaccacataattaatttttatcacagatttcacagattttaaactcctcaagttacatttctcaagtagtaaaatcacttatttctgagtgcatttaagatggaccttgagtttatttaaaatgcagattcccaggtcctgttctatgcctgttaaatcagaatctctggacttggaactaactgacaagtttgcactttaagcaaaaatcctggtgaattctaccgactaaggttttaaagcaattcatctgacatgtggagtacaatctctttagttatctttagtgaatatcctgcataatattcacaaagattgtaagtaaatagttaaatgtatcaatgttaagacttcaacaatttaagaaatgttcccaaatgcagctggttttcttacaaactgggaggtatagttgagtgtatgaattggaaaatgaggactaaaactctctttaaggataataccaaaggtaattttcctaatccatactttttaaaatattgcattggctttggtcttcttgttgaacggttaataatttgaccgataaatctataaattcttgttaagagcttactataatcttagctacataaaggtgatacaaaaggaagggaactatatagtgcatgaaatttgacctaagagttatgaagagtttgagaaaacaagagaaaatatgaaagattatcatagaacagaaggtaattgcatggtattaattttaaatgctgccactattcacaggctaaggaagaacaaagaaggtttttgttgtaaagtcaggtttcaggaagtgatttggctaagatctggacctaaaagctgggtaatatcacttacagaaaatatcattactgaaaataccgaaacagtcactacccacaatttagaagaaaaaaacctaaagttatctttgtcccataataatcaagcagttgtcatttagctcctttcaaggtaacaagggatttcatagaatattatacttcaatagcacttcatcaaaatttcatttgcagtaaatctaattatctcatttcttttttttttttttttttttttttttttttgagacagagtctcgctctttcacccaggccggagtgcagtggcgcgatctcagctcactgcaagctccgccttccgggttcacgccattctcctgcctcagccccccgagtagctgggattacaggattatctcatttcttacaaaagttacccatggtgctgagaaaactagaaactggcctttagatgatgcttggtattgttcccatttatttttaaaacttgatatttcttcagagaataaactttgactgttatatgatgacaacatgtcgggtatcatcaatttggattttgttagattcattttttttttagaatcccaagataaattgctcagtttttatgcttagtttaaatttgagagccttaatataaacttgtacaattttgttgtcactgtatgttttgttattatttgggaggtgaggagagttcatttgcagtacaattttagcatattttataatatagtcagtcaaaaaaaaaagcttcacatgtatatatttcttctttattttagactgtaggttatgtattttaaaaccaatggttagatgtcccgttatacagatttacttcttcctatttggtgattttttgatgcattaaaaagagaaaattgtataaacttaatgactattgacaagtattcagagagataataaagatctataattagcacaatggaaggacctccaaatccacactcttttgacgttttctcacctaaaaagtatttattgcagttttactggtcgattggttgtcatttttctttcagttgtgtttctatgcagaaattgcatggaactgaacaggaattgcattagaattgagattgcttccgatattattcactaatgggcaaatccattactttaggtccatttcatatacaaggaaatgcagttattccaaggacaattcaggtaaataactaccgcagcatggacccaagggtagcagtagaaagtggtgctgctctaagtttctcctctagtggatgccaaaagaaaacattcttatcactgtgtacatgctaggcataattgttttggtatgtgttcagcacaggctttggcaaaagtctttctatgtaaatccaaacagtaactgttgaattactcatttaaacttacgtgtttcacagcacaagttgttagtgaaaggtttcaacttcttattttagacattaaacagatacctcaaatgtttgggaattcttcgtttacatctcagcaatggaaatatttagctttttttttttttttttttttttttttttagctagccaagagtccctgtacagtgagcaatcttttggggtcttatcttctcagcactgaagaatttctatgtggacactaaagtaatattaaaaccactcactctcactggtaatttacaaaatacagttttaataaacagcaatatcgacaacaacaatagcagtgatgaaacctctgaggcaagagagaatgttaattttagcaaagagtgtcttgtcaactggacaagccttaccagttcctagcctctagtttgtatacatttatgcaatcattttgaatatctactccctgcatgctggtaaaaaaaatatgtgtcaggacattacatgtgaagggataattcaacatttaagtttttaagagtatgtttttttcagatcttgttccccaaagttaaacattgtggtagattgagactttcattattaaatattcttacagaaaacaggaaatcataaggtcttatttataatcattaagagaaacctgaaggccaattactcattgagtgtcaggcaactcaattacattattgtataggactttggtatgataaaagaatcctcagaactatattaaaaaattgtgagaaggagtttacacaggtcagcctataaaactactgcataatttctatctgtaaattaaaatagaaaagaaaaaagattgaattaaatatgataatagtaaatttcatttctaagtgtgccaaactagctggcctttcctattcttgaataaaattattctggttgccataatgcatcccgaagcttacctagatgaggagaaattcaaagtattccaacgtctggcctcatgaatagatcaagccttgggggaaaccagtgatctcttggcaacaggaccagaaggtacgtaatctcttgttttaattatatttcatctgctgaaaaattgcttatctctctgagatttatcttagagatgactgaaagtaattttgtgaccttcacattgtccatatctaagttagataattgaaaatttggtgaggatcccaaaacctcaagtatgtatggagattaagatttccaactctgaagaaaaactgtcaggttcaaatcttggtcctgttcacctctgatgactagctctgtggttacgaaaccctcctgcctccctttatccatctgaaaaaaaaaattggtatgactacatggtttggcaagtgggggctaactgagctactagacaacttacaccgtaagttgacacaaagcacatgtacaataagcataattaatattacattattttattttgtatgaggtggcaacaaatagttatcacatgcttaattttaaataagcattaatagtggtagaaattaaggaaatatattagagaaaactcttagaaatatgaaggctctatctagttatatttgtttcttatgtatcacatcctcaattttaaataagaagcattaataatagtagaaattaagaaaatacatttattagaaaagtctattagaaatatcaaggcttaatctaattatatttgtttgttaactgaacttgagacatatgaatattcacatactttaagatattttatcacctatttgaagagggactctggccactctaagaacaactcgcacatagcaaaaactagtgattgagtacattctaaagagtaacatacattttgaaagtaagctgttgttgtctgggcatggtggctcacacctgtaatcccagcactttgggaggccgaggcgggcggatcacgaggtcaggagatcgagaccatcctggttaacacgatgaaaccccctctctactaaagaaaatacaaaaaattagccggccatggtggcagacgcctgtagtcccagctactcgggaggctgaggcaggagaatggcatgaacccgggaggtggagcttgcagtgagccaagattgtgctagtgcactccagcctgggggacagagtgacactctgtctcaaaaaaaaaaaaaaaaaaaaagtgagctgttgttattgaactttttattattacttaattacaagaaaaaaacaaagtaaacaaccaaaaaaattatagtgttgagaaaatgccaaggctgctcacccacttctttaaccattcttcaaacttaccatatatattttttttgactaagtgagataaatcacattgaaatgcatgaaataatgtctggcatccggtagatgctcagtgactttgtcccctttaatggtttcagctggctaggatttcacacgaagaacagtagcattttggtatcactaggctaacgtccattttctgtattggagagtagagaaaccccttgggtgatagcttattttacctactatggaatttttacagaacaaagttaagggtcatctgctgtgtggattcccactggttacgtgagacgtggcagaacataatggtaagaagaaggattcaggagctgaaccatctgggttcttcaggctatatcacctactgcctatgagaggcttagccagttagttacctttgcgagcttcctctggtgagaatcagaagagttaatacataaggcaccaattataatactaaccctgggatgtaaaaaggctgagttattattactggttaccattattattaagagtgttaataataattactacagcaatcttttctagacaagggaaagtgaagcaactaattaactctcaaggaaaaaaaggttttttttcactgctaaagactattaactctgacatgagttttagaatagttttgctttctctctctttgcctatattttctttattttttattctaatgttttcaatttactcaaggattttggtactagatggtggttctggtaggctgatcaaagttcataccacaggcagttaattttacccagatggctcctggttcctttcttttttaaataaatcatatccactgccgaggttgatatgaggacttctgtccattggcaagtagcattgtagccacaatctcttattaaagcttgaaacaaaatggtgattactagtgtttatggccaaattttgttcatgcctgcccactgaatttgtttggataccaggaaattacggactgtgtgattcaaattaggataagagattaaaccctgggagccattctttagcaaagactgtgctgttaaaaaaaatggaaaatatccttttaaccaagtcagtgaaattagcttagtcatgaggattgcaagtgagctttctgaacttgagatgtaaacacagtgccaaaaaatttcatcaggagactggggagagatgctgattcttattttgtgagagatttgtaatgctaacttaatcttctgactgaaccccttaatttcccatttttaactattctagatgcttgtctcaggaaatggaagaagaagtctcctcaatgttaccagagacatgccatgtcatttctatcttctcgatacaactacttagttccttttttctttcatttttgcataatttccatagcaacatgtacatggtgactacattacatcaatcagcacctccactcctggtcccagttttttctttgctaatcctcactgctgacttttgttgttgtggtttcattatcatttcacaaggtaactactgtcaccttggaaatgaattgcgtggtcaaagccctttaatacacaaaatatgtaaaatctcctcttatgcgtattatacatgaaagaaggtaagaccatcagttagttgtgtctcctctgtagaaatagccagagcaccaggacagctgcatcctctttcatagaagtaggagagcagatgctgaggcaggacacaatagttcttcagcctgtgttttctccacttgcatcctagagcacttgttgaactctctcttaggtaaatggtaatattttctgaaggcactaagggaatttttaccatgagggtaaataccaattagctattatctcctcttagtaggagtgtagcacaaagaacttctgattgattgcttttcaggggcagggataatttgtttgtttgcttgtttatataattatttatgattttagtcagattgcattctaagactttagcaagatttcaatgaacattttcctattttttctttttctttcttccttttttttttttttttttttttttgagacagagtctggctctgtcgcccaggctggagtgcagtggtgcgacctcggctcactgcaagctccacctcccggtttcatgccattctcctgcctcagcctcccgagtagctgggactacaggtgcctgccaccatgcccggctaatttttttgtatttttttttttttaagtagagatggggtttcatcttgttggccaggatggtctcgatctcctgaccgcgtgatctgcccacctcggcctcccaaacattttcctatttaagctttgccactgaaaattttctgtctttaagtcccacataacaactgcagcctgtaacatcttgctgactggcttgacagaggatggccaatttttgtgtttaggctcagatgtgcagtgctgggttctcaaattgtgtcccagcctgggacagtgtggctttaataacatcctcattatccatcctttatacaaaaaaaccttatatctgtatgcaaagccatgggctcttaagattttgagtgcatcatacacgctacaggcagcagatatatgaaggatgtgctttcaggccaatctctgcctagtgtaggcccaggtggtataatgcctcataacagaccacattccctgggcaaagacattgtgaatggtgggattagtatcctcctgtgacatgtgacatcctcctttgacctactcattatgatttggatagttcccctcaagtttgggctagagtgtcagtgagtggattaactcaggacaattccagttctttctatgtaccttactttcatcatgagggatatgaagaaaacattagatcatgttggatgctgtttgtctgttgtttggttggttgggtttaactataagagcaggtatctagtcttctaattttgtaaggctgccataataatttacatccaagctggtggcttaaaacaacagatatttattctctcacagttgtagaaaccaaaagtctggaatcagtgtcagaggaccatgttccttccaaaagccctagggaaaaattttaattcttccttgcctcttccagcttttggtggctccaggcgtttcttggctgatggcagcataactccagtctctacttttgtcttcatatgtcattattccctacgtttctttgtattctccttttctgtctcttataaggacactcattggtggatttcgtgcttatctcaatccagcatgacctcaaattaagatgctaaccttaattacatctacaaagattcttatgccaaataaagttacattctgagattccagttgaacatatctttggggagccactgttgaacctactatgcctaacagctcaggcctgtcccaagggcagatttaaaaagaaagagaaattcattttgctttctgattttgagattgttcctcttacccctacactccattttcaacacctgaactttatcaagaaagctcaaagacaaaatgtggccaaggttggcaataaatacatttttgccaataatctgatgggaaatgtatgttacttcttataaatcaaaataaattggatctgctggcaatctggttaacctgcaatttagattatgacaatggtgttcttattttatgcattttcacatgctccaaatctccttctgtatccctttctaaaattttgctgagagtccatcttttctgaccaaaggtgatttgattctccactaaagtagttattaaaaatatctccttgtagataaagaaaaagtggttcatgtataccactggaattctacacagccataaaaaagaacaaaattaggttatttgcagcaaaatggatgcatatggaggccattatcctaagcaagataacatggaaacagaaccaaatactgcatgttctcacttataagcaggagcaaactattgggtattcatggtaataatggtggaaaggatagtcactggggactactagaggatggaaagagggtgagaggcaagggccaaaaaactattttttgggtcttatgcccactacctcggtgaaagattgattcatactccaaacctcaacatcactcaatatacctttgcaactaacctgcatgcatacccccaattctaaaataaaagttgaaaaaaaaaaagcttagaaaagaattgaaggaaatacaaaaataagttaccatgactacctcttgatggtgagtatgggtaatttttgttggtttatattgaccccctatttagcaaaattcctgaaatgatcacattaatgggaaaatatagtttttcagttcctagaaaggtttgcttggtttgtgtttaaaaacaaatgattcaatggctcttttcacagacttgatggtgatttgggagaaaatccagaaattggtgacctatcatgagttcataattaggcgattatttctgataaaccatttcaatagcattaaaatgctaagctgaactaagatgttcatgaaatgtattcaaataaacaaacccaatttaaatatgattgtataaaaatatcttacttgaattgataatataaatgcaaaatttgtgaatgtttatttatagttcctgtaatttggggaaattaaagtcacttgggaacaatgtttacttcactagcaaccaaaggagtacaattgaaaaataatgacttgaaaatataaaagttaaaaaggacttcatttcttttcacacagtctgaaagagtgagtgcacaagcttttctctgcccaactcctctttgtccacaacgaattttcagaattcctccgtgtctgtcttataatttcattccttgctcatctaagcaagttggttcagaaaccctaagactcttataccgtcagttgggttagtttaaaataacccctatgagcagttcaacactgaattggcaatgctttggaaagcagagaccctgtcagctaaccagccatcctttaaaatcaattcatattctcacagtccctggggattgtttcacagagctaaaatttcgctgttggaacagggttgcttgaagataacagggacacttgaaggtaaggatgtcaatattttgctgtttctgaatgtcattcattcacagatggcttaagacatttcaattaattcaaagatggcataagaaatttggattttcaaactttagttttctcatcttagagtttgaggtaattttatttgtcagctgccagaaaataaaaagaacgcgtaaggtagcagactaatatctacactgacctattgtaaaaccagaaggacccatttattcagcaagagacttctttactgtgtctagttcaggttcccggaaagatgggacaattcgtagtaacactcattccttctgctaagtgtcatgagataggtttagacatacggtctcattttgatgatgttttaaactttgtttattttacataacctgtgatagagccagtcaatgtaggggcctaaacgtcggtatagcctgtaattttgacagatgcccagattgtggtattgagaaataggacagatgtcccgaggggcatatgtatagaaatagatgacatttcacagagaatttactaatttaatataatgctgaaacaacatgtgatagtagttgaacccataatatagaatacatttggggaaatttttctcacatatttgacgtggtgcccagaactatatgatgtgaagagtaattgtgtgttttatatgggaacacattagtaaaacctcatgtaaatcaaaatcaatccagatgaaaaataattaataatggtgtttacaaactcaaataatacctgcacaaggcaatggtataaacaaagtttacaatgcctccagatggcaatatttgaaagatgatttcgagttttacacacaaatcgagaatttattcatataacatatggagctaactaaaatccatataattcaaattcgcttacattgtaactaaatggaatggaaaaggagttcctgttcattttaccactttcagaatagaaaattctggatctggtgaaaattgatcattttccttttgttttaattcaaggtatagacccgtgtctaaagacatggttaactgtttaaggagaatagaagatgaagaagggttaaatgacaagcaagttttaaaagtctgatatcaactaatttttaggcaaggaagatttaaaaatttcactgtgatttgagtgagaagcccctgatttcttatatcacattgtaagtttaaagaggtaggaataaaaacatcatggctaaatcacctgaaatgacttcaaattttctacaaatgataaacatatccaatgtgataattataattcaaggcccattttaatctgaccctaaattttctttcccattctaaaaatcaataagctaatcaataagctcataacatcctacagattctgcacacacacatgcacacacacagagaaacacagtcacttcttcaaacacattgttttttcatttttcttcacctttcatctatttatttatttgagtgcccacctccaaggtaagagggttattgagataattttataaatgtcatggggcttgccctcataaagtctatattccagaaaggaagttgataagaaacaaccaatggttcaattatttattaaaattagttttgatcattatctctctatccactattaatctacctataatcttctttgctcttttccatgtttaatgaactcttagacttttcttttaacttttattttaagttcacgagtacaagtgcaggtttggtacattggtaaatttgtgttgtggtggtttattgtacagattatttcatcaccctgatattaagcctaatacccactagttatttttcctgatcctctccctctaccctctaccctgtgaaaagccccagtgggtgttgtttccctctgtgtccatgtgtgctcatcagttagctcccacttataagtgagaacatgtggtatttggttttctgtctctacattagttggctaagaataatggcctccagctccataatgtccctaaaaaggacatgatctcactctttttatggctgcatagtattccatgatgaatatgtaccatattttctttatccagtctatcactgatgggcatttagattgattccatgtctttgctttgtgaatagtgctgcaatgaagatatgcatgcatgtgtctttataatagagtaatttatattcctttgggtattgataaggtttggctgttaccccacccaaatctcatcttgaattatagctcccataattcccatgtggcatgagagggacccagtggaagataattgaatcatgggggcaggtctttcccatgctgttctcctgatagtgaatagatctcatgagatctgatggttttataaatgggagttgccctgcacaagttacaagttctctcttgcctgcctccatgtaagatgtgactttgatcctcattctctttctgccatgattgtgaggcctccccagccatgtggaactgtgagtccattaaacctcttttctttataatttacccagtttcagatacatctttattaacagcatgagaacagactagtaccggtaatgggattactgggttgagtggtattcctttctttaggtctttgaagaatcaccaccctgtcttccacaatggatgaactaatttacactcccaccaactgtgtataagcatccctttttctctacaaccttgccagcatctttcatttttttatttttgataatagccattctgactggtgttagtatctcattgtggttttgatttgcatttctcagagtctaaaatctagaattaaaacttttaacttggtaagcctatgttgaatggctacagagaacctagataagcaattttcatttgcattttatccaaaacaggtggcaagaagaaaagtttaagaatttcaggtggcttgattggactcttcttcatgggccctgagtcaaggaccttctcttccagtgaatttaagggttttgtggaacactagtctttctttatgaactctgtcctcttttctcatacgatttatcttttccatatatggatggaataaaactgcagaaaatataatgaaatggaaaaccatatattttttaaaatagaaatttttgagtattgacgttcaaggttttaattctagattaaaaaatacattttatttacacactcatcagttaatgggcgcttgaattattttcacttttggtttattatgaataatgctactatgaacattaatgtagaagtatttgtgtgaacaaatagaacagacatggtcagttctcttgggtatattcctacaagtagaatttctgggtcatatggcagctctatgtttgattttatgcagaatttctaaactgtttttcaaagaaactgttttacattctgagaagcaatgtatgagagttctaattcttttacatcctcaacaacacttgttattatctgtcttttttattatagttattctggtatttgtgaagtttcatctcattatgattgtgatttgcatttccctaatggctaataacagtcagcatactttcgtgtgcctgttggccatttgtatatcttccttggcgtaaagtctttcaaattacttgctcattttttaattatttgtcttttgattttttggttgtaacagttccgtatatattatgcataagtccttatcagatacacaatgtgaaaatattttagtcctgctatacttggttttcccctttataagtggtgtattttgtagatcaaaagcctttaattttaatgaagtccaatttaacaatatttttcttgtgttgcttgtgttttaagtgtcatattgtttgttaagtgtcataggttttttaatatgaatgagtgtgggattttctccaaagatttttctacaaccattgtcatgattatcctttttgatcctttattttattaatataaatattttattaattgattctccattgttgaagcatatttgtgtatctgggataaatcctacttggtcatggtgtgtaatcctatttaaagttactgggtttagtttgctagtatttgattgagggttttttttgtttgctttgtatttataaggaatatcagacagtttttttcaacatttattttagattcatggggcatatgtgctgctttgttacttggatatattgtctgatgttaaggtttggggtataagtgatcccatttaccaaggtactacacatagtacacaaaagcaggtttttcaacccttgcctctactcctccttcactccacctgctagctgtacccagtgtctatttttgccatctttacgtttatgagtacctaatatttagctccaatttataattgagaaaagactgtatttggttttctgttactgcattaatctgcttaggataatggcctccagctacatctgtgttgctgcaaaggacatgattttgttatttttatggctgtgtagtgttccatcatgtatatgtgccatgttttctttatccattccaccattagtgggcacctaggttgatttcatggctgctattgtgaataggactgcgaggaacatatgagagcctatgtattattgctaaaacaatttgttttcttttggatacataaccagtaatgggattgctgggtcaaatcgtaattcccttttaaagtctttaaaaaatctccaaactactttccacagtggctgaactaatttagatttccactgaaagtgtgcaagcattcccttttctccatagccttgccagcatctgttattttttgatgttttaataatacccattctgactgatgtgagatggaacctcattgtagtgatttgcatttctctgatgattagtgatgagaattttttatatgtttgtaaaccacttttatgtcttcttctgagaggtgtctattcatgtcttttgttcatttgtattcattgttttatgcttattaattggtttaattttcttatagatttggggtattgggacctttgttggaagtgtagtttgtgagtattttatctcattctgtaggttgcctgttttctctgttgataatttcttttactgtgcagagctctttaatttaattagatcccacttgtcaatttttgttttggttgcaattgcttttgaggacttagtcataaattatttcccaaggccaatgtccagaatggtgtttcctaggattcttgtagtttgaggtcttatgtttaaatctttaatccaacctcagttaatttttttatatggtgaaaggtggggttgagtttcattcttctacatatcgctacccaactagcccagcaccatttattgaatagggagtagtcttttccctgttggttatttttcttaactttgttaaagatcagatatctgtaggtgtgcagctttatttctgggttctctgttccgttccattggtctatgtgtttttgtaccaataccatgctgttctggcaccagcaccatgctattttggttactgtcacctgatagtatattttgaagtcagcaaacatgattcctctggctttgttctttgtgattaagattactttggctattttggctgtttggagtttcatatgaattattagtttttttctggttttatagaagaaaaataaacgacatggtagtttggaacttcctagagacttattgaacggctctgaccaaaatactaatagtgatatggacaataaagtccaggctgaagtggtctcagatggagatgaggaacttgttgggaactgaagcaaaggtgactcttgttatactttagcaaagagactggcagcatttttcccctgccctaaagatttgtggaactttgaacttgagagagatgatttagggcatctggtgcaataaatttctaaggagcaaagcattcaagaagtgacttgggtactgttaaaaacattcagttttatttattcagaaaggtaggatttggagttgaaatttatgtttaaaagggaagcagatcataaaagtttggtaaatttgtagcctgatgatgtgatagaaaagaaaaacccattttctgaggagaaattcaagctggctgtagaaatttgcataagtaataaggagccaaatgttaatcatgaagacaatggggaaaatgtctccagggcatgtcagaggtctttatggcagcccctcccatcacaggcccagaggcctaggaggaaaaaatggtttcataggttgggtccagggccttgctgctttgaacactctccaaacttgctcccctgcatcccagccatggctaagaggagccagtgtatgtagatcaggtcattgcttcagagggtgcaagtctcaagccttggcagcttacatgtggctttgggcctccaggtacacagaaatcaagaattgaggtttgagaacctccacatagatttcagaggatttgtggaaatgtctggatgtccaggcagaggtgtgctgcaggggcagagtcctcatggaaaacctcatgttagcgcagagtggaagggaaatgtggagtcaagcaccctctggggcactgcctggtggagctgtgagaagagggccaccatcatctggactccaaaatggtagatccactgacaacgtgcaccatgcacctggaaaaactgcagacactcaatgccagctcatgaaagcagccagaaggggagctgtaccctgtaaagacacaggggcagagctgcctaaggtcatgggcgcctacctcttgcatcagtgagacctcgatgtgagacatggagaaaaaaggatcattttggagctttaagatttgactgctctgctggattttggatttctatggggcctgtagccccttcattttgccaatttttcccatctggaatagctgtatttacacaatgcctgtatctccattgtatctaggaagtaactaacttgcttttgattttacaggctcataggcagaagggacttgccttgtcttagatgagactttggactgtggacttttgagttaatgctgaaatgagttaagattttggaggactgttgggaaagcatgattggttttgaaatgtgaggatgagatttgggaggggccacgggtggaatattatttgctgtgtccccactcaaatctcatccagaattttagctctcacaatccccatgtgttgtgggaggggcccagtgggaagtaattgaatcttagaagtgggtctttcccatgctgttcttgtgatagtaaataagtctcatgactcatgagatctgatggtttgataaaggggagttcccctgcacacactctttcttgcctgctgccatgtaagacgtgtttgcttcccctttgctttccaccatgattgtgaggcctccccagccatgtggatttgtgagtcaattaaaactttcctttataaattacccaatcccaagtatgtctttattagcagcctgagaacagactaatacaacaggattgtgggaagttctccaggcattcagagcacccaccttcctgaattaggagtagggaaaccaactgcaccaagatctttgcacagaagaggtggggtgattcaggctgctgaaccaggcaagcagaagctttgaatgcctggagatctacctgagcatgtagcagcaaaggcccctgcaccaagacctctggccaggaagggtggggcatatcaagctgctgatccaggcaagttggtgctctgaatgtctggaggtctgcctgagtgtggagtagagagggccattctgtatcatgatctacgtccaggaaggttgggtggctcaggctgctgaaccagaagaacaggtgctttaactgcctggagatctgcccaggcataaagcagagaaggcctccctgcaccgtagctctgaacagaaagaatagtggtgagtcaggctgctgattcaagtgagtaaatgtctggaggcctgcctggttatggagcagagaaagccccactgcaccaggatctctgtacaggaagggtggagcaggttaggctctgaacccagtgaacagatgctcctaatgcctggagatctgccttggcataaagtgtagggggctgctctgcaccacaatctatgttcatgaagagttgagtggctaaggctgctagtccaggaaagcagctgcgccaaatgcctgaatttttgcctggggtttgagcagaggacctcactgcactattatcttggtagggcagatggagacacctagaaatggcacacacagaccaattccaggtcactaggctggccttggctgcaaatctcaccacccagaagaaactgcagctgtagcagcactcctcctgccccaggcttgtgacaagggaaagcacaatttcagtgtccactctggatgtgctttccatagctctggtggtggaggcccttatcccactctagagcaggcccccccccccaatctctggttcaagaataaaattcctgagtggtcatgctgccaagttgccaaagaatgcctgactttgtatgcctggattaaaaatgttatcctgttcttggtcccaggtctgggaaaatgtctgcagcttttcccagtgtctttccctcacaacatctccaagcctctccccatgctggctctagggcttgggagaaagacagtgctgtttctcgacctgggtcgcttgagttcccaatggaaaaatgagtcacatagggaggctctctgcctctctcgtatcctcctggagcttcaatcacttttaccaggcagataccatcatggagactgtctgtcagtgttctttctcctccacaggatctggagtgcccttcacaattctgatgatttcccattttcttcttgaattaaagctcacagagttgatctttatgcactacttactacttccaagtggctgaggcatcataaaagcctctaatctgccaccttgggaaaaacaaatagggattcttaatttgttttacttgtgacgtatttgtctggttttactagtcttataaaaagagttggaaaataatccctccttttctattttttgagtgtgtttgtgaagaattagtgtaaactcttctaaacatttggtagaatgtatcagtaaagccatctattctagggattatgtgtgtattggtggagggaagttttatattgcctactttatttcttccttcatgtattttgggattctcttgataggggcatatgtgcttactgttatgttttcttgatgtattaatcctttctatcattgtaaaatgctctttctcgctaatcacaatttatctcttgaagtttgttttgtgtgttattatgaccaggtctcttttgattactgtttgaatgatttatcttattcagtcatttgtattcaaactgtttgtgtctttgaatataaagtgtgcctgctgaataaaacagatagttggattatgttttttctaaacccatctgcaaactctattttaaatggagtttttaatctatatacatttaatgtaattactgatacatagaatttatgtttgccagtttaccagttgttttctatatgtcttctgcttttttatttctctatttttctaagattgccttttctttagtcaatagatatttttaatgcactgtattaatccccttatcactgattttattatattttataagttattttcttagggttgcctgatgggctacaagtagtatcttaatttttaaaaatctagttagatttaccatcaacttaattttaatagcatacaaaaattttgattctaaatagcattgttctctccttcttcctttgttgtattactatacatattacatctttattcattgtatgccaatcggtacattacttataaccattgctttatgcagtttatttttgaatcaggtaggagaaaagaaaatagttacaaagaatacatttacattctctttcatatatttctaatttttgctttttctattgttctgcatttgtttatatggactctagatattgtcaagtgtaattttatttcatattgaaatacctcttttaatatttcttgcatggaaactttgctagtaggagattctgtcagttttggtttcagagaataagtgagaatattttcacttctttttcatttttgaagtatagttttgttggttatgaaattaatcgttgatagtcatttacttccaaaactttaaaaatgtcatctcactgcctctggtttccatggtttctaatgaaaaatcagtgaaaaattattcagactcttttgcacatgatgaattgctcctctcttgttgttttcaagattctttctttgtcattttcttttgattgtttaattataattttttaaaaatgtgaatctctttgagtttatcctacttgggagtcatagatcttcttggatgtgcaagttagtattctttatcaaattttggaagtttttaagtatgttttgtattgttcttcatatatttttatgccccatttctcttctgttccctctccttttgggacttccattatacatgttttgctatgcttgatggtatctctgagtcagtctatttgtctttatttctttttctttctgtttcttgcattagataatctcattgacctatatttaagttagctaactcttttccctgcttgctaaaatctgctgttaagtcactccagtacatttttatacagttattatacattttaattctataattaatatatatttatacaattgcttattagtattatttatttggtgagacatttattctcaaatgttcctttagatttttaggaatagcttattttagttattaaacaaatttttatcatggtggatttaaaaacctttgtctactaagccaaacacctgagatttctcatggacagttttatcgattgcgtgttttcctgtgtatgagccatattgtcttactttttgtatgccttataagtttttgttgaaaactgaacattttaaataataaaaatgtgacaactctgaaaattatattttactcccttcaaattttgttgattttgctatttgtttttgttgtcatttgtttctttagtgaattttctgaactaattgtctaaagtttttgttttttatcatgtttgaacactgaagtctctgtttgcttaacttactagtcagtgaaagaatagacagaaatttcattaaagacctggaacccgtaactcttccagtctctgctgagtggctctgtgtgcattttaggccacacttttaacacccagctggttggttgacaactctgccttagtcttcacattctgctttcccatagcttcatggtcatctggaggtgaaagcttagggccttctcatatttttcttgagaataagcattgtgcttagaatgtgcacaatcatacatgtgtgtgaccttttatagtgccagtaatatgtcagaagtctccggaactcctatgtacatttcctagctttttaagttttccagctaccgtattatttgccctaactgttatctaccacttcattctaccatgatttaaagaatttgcctttcaatattttcaataagtatgctagttaaaaagactttcatgggccagctacaaatgaggtcaaataaagacagttttataagtggtatcttgcagtaagccacgttccaggtcaaacaataattctcagggaactaagctgaaggctgccaggctgctagtagtcagcgactgagggatatttgttttcagggtaactgtagaacttgagacagggtgatgagaataggcagcttaaaataccacaaagcttacagctcttaccataatttagcctttctcttttgtttttttgtttattaaataaattattttcagattcctcaaagtatttggctaatttccagagttttaaaagagctgattctgattatttttgcacatttttaattgtttatatggaggagataatttgcatatgccctcacatcatcatttgtattgctatcactcttctttttcatattacggtcaaatgtaatatcactagaagtaaaaatattttcatgatcacttgctaataagataaaaataagatatctattacgtatataatttaaatccaatttaagatcaagattcagccttaaacttgaccttttcagaaatgctttttaatattcagaaggtagtggttccttcctaaataacacaatgtagctgtaaacaattggatccgtttcctttccttacccatttcattgaacaaatgtcttttccctcaactcccttatattttagaattatctgactcctgtggtcatcttctttccgagggttagtaatcatgaaataacttctaagcatataagtttttagaaattcatttacatgatgtatagtaggcacaccgtctttcatggaattgaaacaggattccttcttatctcaaacctgcaggttgttgggaagcatgtaagtgatactgttcactttggctacatcacgccattctaaattcatatcttttcaatgctattatttctgacatttcatgctgtaaacctagaaaggcagtactcagatgtccactttgtggattttgtatttttctatgtgataggcccatttaataatatatttttccctttcaggcacttcgaataatttaaagcaaattattttcatggaaaactggtcgatgtttgagtcctcaagtgcttacactaggagggaagtaaccttttcagatgagtgtctgtttcactacatttccacaagaaacatcaaatttcatatttcactatttttaaactagagaaatctaggaaattgtcattttccaagaacaatatgatgctgaatttccccctctccctttgccaaacagtgtgatagaattttcagtcattctcacaagaattaataattattctattactgtttcaaaataaaaattctctgccattatctccacaaaatttgtcactttgccaccaccagcactatgatgactgagaataatcagagcataatttgattcctataacgttaatagaagctgactaaatggacatttatttgataagtgttagagtgtaagctccacacagacagtttttttatctgtttttttcagtgtcagataccaagatttgagcacagtttctgatgtatactcagtgctaaatagcatgttgaatgaaggggtgaatgactcctgtgctcaaattctatttgattaattcaaacataatctgcctcttgtgcacaggatgaaattatcctgactctgtatttttaactataataatagcaatatgaaatatatatgtataattttataaaatttacaaaatcatttacacaccacattttctcacctaagactctaaacagagcaaggctttatgatcataattttattgataatcacatttagactaggagaaatcgagtgtgatttatccaagagtcacagagtgagaaaatatcaaaaggaggattcaaactcaaggcttatgacttctaagtctctatgtatttcactacatccatacattctatatagtatttttcaaagtttgcaaagcaatgccccttatttaccttatgtgatccttttatttctccgcttccccaactttggagttaagcagggttttgtttatctaatgctacacaaaaagtcacccccaaacttggaaaccaaaataattatttatggtaatgtgtgttgactgagctcaactggttatttctcacttcagatatctcctggagtgtcggtcagatgtagcagaatctagagtcatctgaaagttcaactagactggacaaccaagaaagtatcttcattcacatgtctgacacctcaggtgggattgctaaaagagcagacactatagctctttttctttttgtggactccccatatggctagctttggcttcctcaaacttagagtcctcagagtgcttgaacttcatgttcaaaaagttggcttcccacagactacacattccaagagaaaaagaaacatgccacattctattgtttacatacggcaagccctcatttattttggttaaaaactatacagaaaagtgaatactggacagcatgtttcactcagggccatttttcaaaagatagcagcactctacaatggtgaacatacatattgtagaactgagtggccaatttctttacctatagcctgggtttgactcacttattggattacgttggaaatccaaggtaaatcttacttaatttctcttagtttccattccttattaaagtatagcaattgctacctcataaggttgtgtcactttggaattagataatcaaaataaatgaactttgcaaactctaaagtgttatctatttttttttttattaatggtgtcatgggacattggctgcttctgtttgaaaatcaaacctttcttcactggtatcttcttaatcctcagagactagaaatttgaagtcaaaatatatcatatgaactgatctttccctccaccaccattttattccactgttatatgtactcaacagacttcttacagttaaattcattttccaaagccgccattctgactaaccactccctaatattctctgtaccaaatatgtctcaagcctggtaaaaaatgaaccctataattttcctggacaacatttccttataaattcaaatttacctaaaattatctcctccataattattccttaagcttctttgagatcagtagcttcaaagcaggtgaagtctcagtaactcgagcagaagatgttacctattaagcatccagcactattgcaggaattggttttcactcaattgtttaattatcatcactgttctctttcaattaggaaaaaataaggatataagagaatagaaagtagggcagtatcaggtactgtattggagaaaggcagaaaaattgaggaggaatgaagtgcatgtacggagagttacgctgtgaagatagtacttcaatagtttccaacacggtgcaaaaagaacttttatgttctgaaccaatcttaatgttaaatgtaacctttatctctcactcattgcactaaaagatatattgaattataactcttcatttgaaacaaatgataatcggaacgattcagtataggggaaaacataagggggaacgcagaaattgtcattttcaggaaaatgttctctggtaagaggataggatgtggtgtggtctttggtagaaatactgacagaccagccactctcaaaggaaggaaagcaaagaatgtgatttcagatgcaggtatgctgatggatttgatggtgggagcatcaggaaattctcttttggctgctatcattttcactgtaaaatgaaaaacaagaatattagctgagagaggaagggcagaaaaatttggaggtttaagaagagaggtcaaagtgtacctcacaaaggtacatgtcccaggtaggacccaaaaactcttttaagggattagtatgaatggtggaaaagaaagaattttgctttcctcagatctggaattgcatgctatattggcctggagctgccaacagccatctttccaaatgtgtagaaaagtcagactgaaaacaaagtcaacacggaaaataatagatcaaatatggaatgagagaggcaaaattcttacattaccattgcagggcatgagagcagccaggcttgtacagagagcaccccctgaggttttctactacatgagtgaataaatttctttgttgattaagcttgtttgaatgtgtttttgtcaattataatcaaaagagtactcaatacatcagatagttaaggagtggtgttttaagtttcacataataaattcttaaaatgaccagaaaaatagtgtaacaaattgatagattatcaagatggtttttagaattagaaaactgagtttgaattttgactgctccatgtaatgagatgtgtgaactttgggcttacttaatctctctgagcttcatatcatcgataaattgagtataatgataacatctcccatgtaagtcctgggcaatatatcagtgttttatacatattatcttcccaatattccaattctccagtagagcaggtattattatcttgcatttacaaatgagaagagtgagacttagcaaggttaataatcagcccaacattccacaactagtaaggtggtattgaacccatgtttctattacctgaaacctggagtgaccacaaagtctcaattcacctgggactattgtagtctgtgcctattgcacctgcattccatccaattagcacactctttcacttacaaaaaaaagaaaatctcggatttgacaatagattagatggtcaccgttgaaggttgggttttacaagaagctgactctgaagtcacagatcagcttgcgggaagttaattggggaatactctctggatctacatcttagggggtaaaaaaaaaaatcaagattggccacgggaagaacaaaagtctcagcaaaccccacagggaccttggaagctggaatgacactttggagttgttccatttggaaaagagtttctgagccatgatatcactgtatcatcccactcaccatatgaggtctggccctaagaaaagggagtgctcttcaacaagatagcactcttcagctgaggacaatttctggagaaagctgacagccgagagttttatgctggcagcactcccagtagctggagaaagaagttcttcagaaggactgggccacatacatctctaccacagctgtaagctttcatttctcatgattgacttactgcctctggacaatagtttcttcacaaagttgctctgagtattttttttttttcttttttgagacggagtctcactctgtcgccaaggctggagtgcagtggcacgatcttggctcactgcaagctccgcctcccgggttcacaccattctcctgcctcagcctcccgagtagctgggacaacaggcttctgccaccatgcccggctaattttttgtatatttagtagagatgtagtttcaccgtgttagccaggatggtcttgatctcctgacctcgtgatccgcccgcctcagcctcccaaaacgctaggattacaggcgtgagccaccatgcctggccgctctgagtattaataaaagcatgcttatattatgtttaatagtacctggtatatattaatatatacttacatatttatacacacaccacacctactcctatacatatagattcaataaatggcaacaattattttgttaaatacgtgtgatatacatataataataacataaatattattattgtaaagttaccacttcaaaacgaggagtctgaaatcattgaaagataagatttataaaattttgtttggagttcgtctaacttgaaagatcgccaagagcagcccagcacaatgtcctgatacataaactgttaaaaatcctgaagcttcttgagagccacataggcagaaagaatctaggtataggtcagtgaaaggaatcccatatgagaagtggtggtggaggaagtgtgggttggtgggagagatgtatggctattaacgtgctgttgaaatccaccaattctcatactcaaaagcctttgggaagaagagaggaaaatgtttttcccctaactgtttgcaatcttctttaagtactaagcccatgattggggtggttgtggaaaaggtggatctagaactccatcaaacaacttccctctggccatttctgcatcctcactgtattatttgttaattctactcctaaaattgtgtggaggttaaccagggctttaaactaaacatattagtagtaaaagagagattccctattgaattaatctgacgtgattacagaaaagacaactcattcctccaggacttggagcctttggagtgtgcacatgcatagaaaatgtggtggttaatttttctaaggtcagcttggctgggctaagggatgcccaaatagcgggtaaaacattatttctggctgcgtctgtgaacgcgtcattttgatagactgagtaaagattgccctcaccaatgtgggtggagctcatgcaatgcattgaggacccaaacagaacaaaaaggcagaggaagggagaactggctgtctctgcttgagctgggacagcatctttttctttctttggacatcagttatttggttctctgaactttggactcaaaatggaatttctgccattgattcccctggttctcagaccttgaagtttggactggcactatactacttgccttcctgggcctctggcttgcaaacagcagttgatgggatttctcagcctccaaaatcacatgacccaatccctcataataattatctttctatatatttttatataggtattgattctgtttctctggagaactctgtctgaaatagatatttggaaatagcaagcaaaaatttcggaaactcttcctagtcaaaatataaagtagacaattaattaccctcatggagtagtagcatcccgggcaatatattttgctaatgcagcaaaatacaattgttagttgactcacacttgctctaagtctatctatctatctatatatgattttttttgtctctttcaattttcttatgctgatcacgacgatcagaagactggtttttagactactggtaactactacaagtttgaaatatttaatttgagttaattcatataccattatgagaaagtttgagagaaacttaatgctcaattaacaaataatttaaatattatttccattttattacttgattccccaagtctttcagtggctgccttggataataggtatgctttggaatgtacacgtgagctttcaaaagcaaaacaaaatgaattatgacattcttttatgaagtagaatttctgagagtaattcagtgtaagtaaaatcaatataaacatctatattacccctgattgatgggaaaaggataatatactatcaaaactaccttgaaagtaatcataaagtggattttccactcaggataacttttcacagttttattccctagaagagaatgttacgtgctattaaacctcatgaacccttgaccttggttcatataaagacagtgagaactggtcccagttattaaagaaatttggcatagacacattcttgcttttatagtaagaaataataaggttttctttcactctggggagaggctattaaagctaaatattacaatgatttttaagggagagagttcgttttgacaatccaagagaagtgtatgtttcgcataaatacataatgtagaggagatttgtgattttataaagatgaccaaaactaaaaacaaagtaagtgtgttaacatatggaataagaaacattcctgttagaccagcttctaaaaacaatttgaattattagacggagattacatttcattttataaagagcaaaaattagataggtaattgtcctgttacaaattattggagaatattttatatatttaaataattcactaccaatgactgcatgaacagaaatacagattacatttactgtccctctctattagaggaagtttaattttatgattgtgtctggaattggtgggttcttggtctgacttcaagaatgatgccgcggaccttcgcagcgagtgttacaattcttaaagatggtgtgtctggagtctgttccttcatattttcagatgcgtcccgagtttcttctctctagtgggttcgtgggttcgtggtcgcgctgacttcaggggtgaagctgcagaccttccccgtgagtgttacaactcttaaaggtggcacatctggagttgtcattccttccggtgggttcctggtctcgctggcctcaggactgaaactgcagaccttccagatgagtgttacagttcataaaggtggtgtccagagttgttggttcctcccatccagagttgttccactctccccatggttcatggtctcgctggcttcagcagttaagccgcagacctgcactgtgagtgttacagcttataaaggcggcacagacccaaagagtgaacagcagcaatatttattgcaaagagggaaagaacaaagccaccacagcatggaaggtgacctgagagggttgcagctgctggctcgggtggtctgcttttattcccttatctggtcccacccacatcctgctgattggtccattttacagagagctgattggtccattttacagagagctgattggtacgtttggacagagtgcttattggtgtgtttacaaacctttagctagacacagagtgctgattggtgcgtttacaatcctttagctagatggaaaagttctccaagtccctacccggcccagaagcccagccggtttcacctctcactggcactggctgcgggactttgcggcacttatcccgggcactccggcagcctagagaaagctcctcccagacaatcaagaggaaaagaggggaagcaagaaagagacggagacccgccatcgtggccaaagaccccgcgaagagggaacggtggtcgacgcacgggacccagcctccgatcaagcccagcaggcgctgagatcacgcccacccagaccgcacgccggccggccagcgctgggcgcagccccggctcctgctggcacctctctcttcacacttccccaagagcagagggagccggctcaggtctcggccagccccagagaagggccctcatagtgcagaggtgggctgaagggctcctggagcgcagccagagcggacgcggaggccgaggaagcgccgagagccagcgagggctgctagcacgttgtcacctctcatgatgttgtaaaataagaaagggtaaatgttatttaagaattccttcctggccaggcacggtggctcacgcctgtaatcccagcactttcggaggctgaggcaggcggatcatgaggtcaggggatccagacaggagatagagaccatcctggctaacacggtgaaaccccgtctctactaaaactccaaaaaattagccgggcgtggtggcgggcgcctgtagtcccacctactccaaagacagaggcaggagaatggcgtgaacccgggaggcggagcttgcagtgagccgagatgccgccactgcactccagactgggcgacagagtgagagactctgtctcaaaaaaaagaaaaaaaaaagaaaagaattgcttgtttcctgctgtagttatttgtcaaaagatacaaaaaatctataagagttaagcaaagctatatttattttgctgcaacactactatgcacagtgacatggtcaagttgctttttataatgatttatagtgatattaatttgcgtcagtcgttttcatgaccccaaagccaactcaataataccagaaaatacttgtttgcttgcctacattttgtaataatccaatgtcctgaaataaaaatgaatattttcttcctggaaataaagtgagataattttcttcttccaagagagtcatgaaacaagaacagaatgacattatactaaactatttcacaaatatgggtcaacagtggaggcttttttgttcatttatgtaaatttgatttggctctattttcctgagttgcattttatgcttctttcacctgccttgccaaatgaaaagaaaaatcatttatttattaaaacatacactaatacaagaaaataatttcactcttcacaaactttggcattatgaagtcactggttactggagatttaatttctgtaacatatctgaagtgcttatttttttctttccatgaaggaaaccttttggaattaagatatggtacattgaactaaacgaggattgcatttgctgtttctgtgataacattttacatctgaaattccaataaatatttctcttcttgctttgaggtggtttagttaatcattcaggtggttggctttcataagaagtaaaggcgcgccagcatttatagtttcccagagttcgttttttgcctcaagcttgtatttattcttattacactcactagcttagataccaggtgaatacctgggagaaagaaaaaattaatttaaaaagtaataaaaataaaagaacaaaaaaacacaaaactattcaacatgccagcaatcctgttctcttaagaaacctacctgtttttttcaatgcgtataagttttagcattttatagcaattagatgagtctctatatcattagaacttatgtccttggaattaggacaatactattttctgcaataaatatttggctctagaaatctattttgacctgtactataatgcatagcagcagaattaaaatattgtgtgttatcatcaaaagtttcagccttattttttcacatttgaatataaatattaaaatgatgaaggccccttttagtctttttattcttagagaaggctgaataaatgttataaaacaagaaaaagactgtaaaagaataattgctaattataaaaaaaatttaaatatatcatcaagccataatagcggttctctatttccttttttaatttaaaatggacatgaacaaactttcataatacctttgtggaatctagttagagctttactccattacagaacagaaacttttcactgtgaagagatcaaaagcactgctttcctttgtggcaaatgaacatttaattatctaacgctaaataaaatttgctggcaaaagatatgctagtaaaaaaacaacacaaggcttttttctgacagtatgatttacatagctacattttcattacttttatttttctacataactagtgtcttttcagttgcaaatgtttgacattctgacaagtagtgtggcagagtcttagattataggttgcatttagccaaaagaaagacttcgaatggaatttttttctattgacacactttctaacaacatacttattttctaaaaaggtttttataacttagtgttgataatatcaaatatctaagcaattttgcttaaaaagcatagaacaccaatatttaatgaagattagttaaatagcacacattgactacttgtttaaaaatattcagaaaagttttgacacatgctaaagtgctgaagtatggttttggccttccataaaaataatatattgtgcataaatggaagcagaatgaagaaagcgatgagaaaacatctagaaaattgctagtgtggtaaacatattaaaataatttggcatgggaaatgttttttctcttttaaatttaattatggtaagaaagaagagcattttaaagaagatgttaatttccatcaacaatatgcaagagaaactaatgtagagtatgtatattagagaaacacataactgcatatatgtatggttaaaacttaatgccttctggctttgtcatttataagaattattacctacacaaggagtactgtgctgaaccctttgcatttccttagttttatcacataaaagcaaacacatctccattttctagattttctttctttttttttttttttttggtgttcacctggtatttacctctaaatttctaaataactgtgcaaaggagggttaacccaatagatgagattgctcaaaccttccacattcccaagaaaaatctattttccggactagtccctggctggctcatggaagcttaagcactgggcttctcagagtcatgaaaataaggtcgctccactttttactctttggttcttggactcatacagtctatcttaatggttaaatgaccgtcaggtcaacacacattctgcatctcaaaggacaacactacaatcccacgcatattatctccaagtttatgcttagcttcacttttaattttctcaggcctcacccttttgggtgatatggggtttagtatgcaaccgtcttgtgtccattaacacacctctttcaccataaaacaggtttctttgcctgtgagtatataatacagggtcccatgccaatatatctgtgaacaatactatccttaagtagtagtatggtcctagccattgctggcaagaaaagcaaattttaaatgagccttactcaaaaccaactgctcccctttttggaatgatcctaaatgctcaacttgcaaccaagtggctggttggcctccccatagaacagtgtcctgttgaggtcatggtttctgatgatgacaggatggatattctgcagccacaatagaaacctggatgagagggagcctatgctgttggcttgccagcagccaccttggctacctccactatgagcgcctccactataagcagctaaggagagatactagctggcatttgctggataaaagacatcccatccactttgttgtttagtgtctgctcttcagtgggtgttctctgatgggccgtgatgtaagataacaatacatcttctttctacctgattccatgtgttcatctacactactttttcccaaatcgaggtcagtgttagggctctgaacacaataccctaaagtttggtacctggtgtgctgagtactttgaactaaaggagattggaaggacctcagaagcaaggtctttctgacttcttatcctcctgtttccttcttctctttctttgctgaagtcagtcatggaactcagaattcctattctccaaggtggatcatagaaagtaaaattcttcttccccgaggcacgtcatggaaacaaaaattctcttccaaagcaagccataaaacctagaaggctcattctaacttttttcccttctcccttgcagacacttattctaggaaggtcctgcccacacctaggaggaagaaaccctacacaaagaggctaataaatatttgaatagaaaggcattattgtgcttcccccttcagtctattaccaatggattatacacttttgtctagtcagctttctacgtggatacccattcttcatgagcctaagcatcaaaatagacagttccccctgggtcattgggtcttcatttctgaaggctcctgtgtcatgtaaaaaactgattaaataaattgctatccttttctcttgttaatctctgtcttttgttacaggagtgtcagccatgacctatgatgtgtgaagaaagatatctcacacctttctaccccttcaccgctgtctattccactcttaatctgcactcaactactgtgactctcctcttggtctcttatcccagagtactgtgactctacctctaagccttgcttcctgctcttgtgccattttttacatctttctctaatcttacggattaaattatatccatttgaacgtctgggatgaaatctgttttctgatgcatcccttacaaatataaggacatttcaacaaatatttaagggaggatatctcagaggaggctgttttggacagaattaacaccaagatctaataatgaaatcataccttgcctggatctttgaaaaacagtacgaccagtgtgaatgaatggagcaaccaagaggttaggcagtaggagatgaggccagagaagaaagagggtgtggtagccccctaatcctggcacttacttccactggatctaaaatccagcacggaattatgctgaccacatcagcctaactaatattgatctaagtaacatttatgttctagcacctaaatcaggagtctgcaaaggatagcccactgccaaaatctggcccactctccagtttttgtaactaaaatgttatcagaactcagccaagtccattcatttacaaactgtctacggtggcagagacaatacggctcacaaagtctaaaatatttactctctggctctttatagaaaaaatttgctgaccccttgtctaaattatagcaagtatgaaatcctctatcatcagcaatggcatagaaggcagcataggaatttttaaatttgcccttgaattatattgtaagccttatgtatgaggtcctatttttgcaaagtgctgagcaccccatcctataatgaggagtgcccactttcctttctcaattggtctgtcttataacatttacgaagagactcacagtctctctgtggccttgtattcttggctaatatcccttttttttcttcctggagtactctctactctgtcttagagtttccaactgtttatctgaagtagtggtgtcagcctctgcaatgctttctgttctacagggtgtagggtcttttttttttttttttttttttttttgagacagggtttcacttccttgcccatgctggatcacagtggcatgataatggctcactgcagccttgacctcctagtcccaaactaatcatcccaacagcctcccaagtagctgggactacaggtacacaccatcgtgcctggctaacttttgaactgttttgtagaggtttccccattttgcctaggctggtcatgaactcccggcctcaagccatccaacccacctcagccttccaaagcactgagattacaggcataagccacagtgcccagctgagtgtagggtcttgatcctctggtctgtcccaccttgtcttcttttgctacaagtaattagacaaagttctaaggtacaacagggatgctgagtctagtttgtttaaagatactattcagttcctatgaaaagatccatgagtgtgtagcttggtttttagtacagccttgacaagttaatccagtagagaaacctgcatgcaaatgtgatttctgattatagccttggctacttacgcagtttttggtgttactgaatttttttaaacaactttccaatttcacaggcttacccaagggtatgatcagtgaaaaccacagcttctttgttagttgtaaaggactcggaagtcagtgatggctgttgttgactcactcataaacagcacattaaggaaaaggaagttgaacagtcgtctacagttgtaaaaggagcacaaatagtctctgtttaatttttttttctttttatatgtggcccgtctaacaattctatcatgatcatcgtcaatcattatcatcctcctcaacaaagctctaattttatttagtttcagaaaaatttaagctgatggcagttcaatccctttgaacctgtgattgagatcatattgttctttaattgtgaagcctcatttagattaatattaataaaatatttatataaattttgatgattttataaatgtagtcttgacagaatgatatgatctcaatcacagaataatatttgtgagaaaccaatgctacctcattcagtaactttaccttatatagttattggctgtttagtttttcttcttcgtggtcaaacaaaacatagtaatcagatttacaaacctagtaatcagattatgagattattcaactcaaatatatacaatataattgtactacatgagctgtttgtacaaacattttcactaacatcaccagaattgagaaatatgtaaagtaatgtatattttttattagatagtttaattccagccaagtatcaagccgtttccataatctgacatactagctaagggaaaataatgaggccactcagaagtttctttttctagttgtctcagtagcttggatgtgataagcatgaaaaaacatgaattgctaaaccaaattaaaaaaaaatttctgaaactatataacacttctgagagggctgcagatttgttagcaggttgtttttcagtctgaaaaaaatgattaaatatttctactgggaatggaacatttcagtcataacaaaatataaactctaaggaagctaatactaatattgtttgttaaaatccttttgtattctttgcttttcatagagggagagagttaagttacaagggaatggtgaaccacaacaaatgaaaagtcgttttgtgagtagtgtacctttgcattgctgtatttcgaaaggtttgcaaaaaaaaaatgaaaaagaatgtcaattatttttctctaaaattgtgcctaattatgttatatgatattaagttaactaatgtttaaagagaatacatagtatgcaaaatacttcacacttcacacatatcatttttaattgaattgttaaaaaaaaataagcacaattgcccctgtttcaccaatgattaaattaagatggccataatctatggaagctgcccaaagaaaaacagtgatggagtcagatataaatgagtcagactccaaatcccaatccctttttcataaagtgtttagtaaatattttgatctaaaatgtaagagtgtggctataaaaatgccaactatataatagtttgattcttgtttctatttatttgaaacctaattagtgtatttccacagtatataacataatgctaaaagagaaatttggtattttcagtttcctttaaattttctgacctgattttattttataaacaatttgcatttaccagaatgttagaaactcggtaattatgttttggttcagtgttttttacctgccatctactttacataaaaaacatttctgtaaaaggaagcagattttaatgagcaagctacacagaaattttcatctcacacttaacaatggatattattgttcttataatttgcacttctcagtcataagacatccctctgtggttgtcataattggtctaatgaatttcttaaaataaatgaaagtctaatttgatccggtgcccatgaacaatccactcattcaaatctaaatcactgacctgatttgaagacgaatcatgccaaaatgaagtcatgctttcctattaagtgtgttgcctcagtgcaagcttttgaatggcttgttcttaaggtttgaagtggggatttccagtgacaaagaaacacaatttgatctcataaccctagacacccagacttattttaaatgacagagacttaagattgagagaaaatctgagtcatcgtccagttcagtacttttcacttagtgggaaatgttctggtcaccttgggtttgaacagtttagcaacattgcaggatcttctacagatgcatacataagcatttgaacaaattctctaggtaggcaaagatcattgcagctgaatgtctaatgatctttatcgcagacttatctatccaatgttccagggtaaatgttctattattaacattcctgaggaaatacattcatggatatatatgtttagctatattatttaactactatttcaaatctatatcaagactggtcttaacatttctaaaataagtaactatatcaacatcataaaaaatgctgccacatttttttcgagaaagaaatactctctagacatagtgttaaacctttctgcattagaactaaaaaccgtgaaaagaagaacagtttttattgtgttaagacactgattgctggttaggaaagagcgtgtgtgtgtgtgtgtgtgtcagagagacagagagagagaaaagcaggggaagcttgtaatgcataatcaaatagtaaggttatgagagatttatcccagattatctataattttcattggtccatgaatggtggaggaaaggtaaaaatatctttaattccagatttcatctttggccaccaacaaaggggcatcacttatcctattggttttaaataccaatgaactagtgtaaaagatgaggattcataaattatttcactcagaacaaagctttcaaatgtctgaaactagccagaatcttgtcaacaatttccaaaatcagattctgaaatttgatgttgtttgcaaaactccttcaccaagattcccaagaaaggaaaatgataggagtgaagtttgggagagaggacataataaaaacataaaattgaagaatttgttcttgatcattgtggaaataggagaataccatattttatatttattaattaacttgtctctaatgacagaaagaaatgtaaagaaatactatgaacaccacaaaattagacagcctaggtgaaatggactgtacacctcaaaattagataacctagatgaaatggacaaatttttagccacgcataaattacctaatgtgattcaagaagaagaagaaattcttaacggcctacaacaagaatggagaatagaccagtaatcaaaactcctcctcaacaacaacaaaagcccagtatcagatgtctcactggtgaattctgtcaaacgtgtaaaaaagaataaacaccaattcatcttaaattcttccaaaaaatagaagaaggagcatttctcaagtcattacatgagacaagcattatccttataccaaagtcagatggagaaatccaaagaacagaaagttacagacccatatttcctatgaatacaagtagaaaaaaggtaattaataaagcattccaatgtataatattatctcaaagaataaaatacctaggaacaaatttgaacaaggaagtgaaagacttgtacactgaaaactacaaaacactgctaaaaaagttaaagaagatctacataaatgaaaatattgggagacttagtattgttatgtttccaattctacccaaagtgatctacaagttcaaagcaattcttatcaaaattccaacagcctctttgcagaaatgaaaaagccagtcctcaaactcatatggagttgcaaagggatctgaatactccaaacaatgctgaaaaagaaaacaaaatgaaaggactcacacttcccaattactgcaaagctagatggtcaaatcagtatggccctggctaatggataaacagacaagccaatagaattcaatagagagtccagaaataaacccatacatctatggaacactgatttttaataagagcaccaagtgtattctatggggaaaagaatagtcttatcaacaatggtgtgggacaactgtatttctacatttaaaagaataaaattgggtctgcgttttatgccatataacaaattaattcaacatgattcactgacccaatataagagctaaacttatagcatgcttagaagaaaacatgagtaaatctacatgatttttaaatttggcatttaatctttttttgtgtaaaactaaaataatgagcaacaaaagaaaagttagacaaattgaaattcatcaaaatttaaatatattgtttatcaaaggacattataaagaaagtgaaataacgtatagaagtggataaaatatttgcaaattatatatctaataggggtttaataatcagaatctacaaggaagacctacaactcaacaacagaaatgcacacaaccatctgggcgcagtggctcaagcctggaatcccagcactttgagaggccgaggcgggtgaatcacttgaggtcaggagatcgagacgagcctggcaaacgtggtgaaactccgtctctactaaaagtacaaaaatttgtcgggcgtagtggtgggtgtctgtaatcccagctacttgggaggctgaggcaggagaatcgcttaaacctggaaggcggaggttacagtgagccaagatcgcaccattgcactccagcctgggcgacaagagcgaaactccgtctgaataggtgtttctcaaataagttatacaaatgaccaataagcacacaaaaaagacgtccaacatttttagccattagggaaattcaaataaaagccacaatgagttgttacttcatatctaccaggataattatataatttaatttttttataaagaaaaataataaatcttggtgagaatgtggagatattgtaaccctcagacactgatgataggaatgtaaaatagtgcagatgctgtagaaaagtttggcagttttccaagatgttaataatagaactcccatgtgacccagcaacttctctcttagatatatgaccaaaagaatggaaaacaaagtctcatgcaggtacttgtataccaatatttattattcataattgtcaaacggtgaaagcaacccaagtaactatccacagatgaatggataaacaaaatattctatataactgcaataaaatattattcagcaatagaaagaaatgcagttctgatgcatgctaaaacatggattaaccttgaaaacattatgctgagtgaaatgagccagacacaaaagtattaatattgtatgattccacctatataaaatatatattatagggacataaaatagaggagaggctaccataggctggggtgaaggcaaatgaagggaaatgttgaaaaataaaagaacaaattgaaagaacacacactacccaattactacaaagccaggtaatcaaatcagtatgatcctggcacatggataaacatacaggccaatggaataaaactgagagttcagaaataaacctatacatctatggaaaatcgatttttaacaagagcactcaccttgcttaatgagtttctatctgagttgagaatttctccctgggatgataaaaagttttgcaaataatgatgatggttacatagcattgcaaatgtaatcgacaccactaaatgatatatgtaaaataattaagatatcaaattttattttatgtgcattataccccaaggaaaaaaaataaaaaggaaataaaacagaatgtatggaatattgattttaattgatcaatatgccattccaactagttttgattttatcccgttgaatttatcctggttatttttaattatatcatcataattacatttaataaaaatgttacaaaaattaaaaatttagagattggcagaatggataaaagtatggttaactatatgctctctaaaagagatactttatattcaaagacacaatatgttgaaattaaagtgaaggaaggggatataccatgagtagccaaaatagagctagatatactaatacagacacatatattttaagacaaaatttgttactgaagtcaaagacattataaaatgatgagtgattcaattcatcaggaagttataacaattataaatgtatatatgcctagctaaagaaatcagaaacaaaataaacaatctaacaatgtaccttaaggaactagaaaagcaagaataaacaaaacccaaagtgaataaatgaaaacaaatgataaaaatcttagcaaaaatgaataaaaattagactaaaaataatacagaagatcaattttaaaaagttgttttttgaaaagacaaacaaattcaacaaacctttagccagaataagaaaaagacctaaataaaatcagaacccaaaagagtcataaaaactgagaccacagaaatacaaataatcattagagactattacaaacatctataaattaataaattgaaaacttagaaaaaatgaaaaaattcctgaacccatgcaacctacaagtttgaaccatgaagaaatagaaaacctcaacaaaccaatagtgaataatattattatgagtgcctttattatgattgaagccataataaaaattttcccatcaaaggaagaccttatggctttattgttgaattctaccaaatatttaaaaaagagattataccaattcttctcaaactcttttaaaaaattgaagtagagtgagtacttcccaactccttctaccaggccaacattatttataaccaaaccagacaaggacacacaaaaagagaatactacagagcagtatcactgataaacatagacgcaaaaatcttcaatgaaatactagcaaaccaatttcagcaacacattaaaaagatcttacaccataatcaactgggattcattccagggatgcaaggatggctcaacatatataaatcaataattacattagtaagcaaaagcaaaaaacatatgatcatttaaataaatgctaaaaaaaccattcaatgaaattccacatctctttaagataaaatccctccacaaactgggtatagaatgagcatacttaagaataataagagccatatatggcaaacgacaactagcgtcttactcaatggagaaaaatggaaagcctttcctctgggatctggagcaagactaggatgcctactttcaccacttttattcaacatagtactgaaagtcttagcaagagcaattaagcaagagaattaaagagtattccaaattggaaaggaagaagctgaattatccttgtttgcagatgacataatgttatacttgaaaaagaccctgaagatgccatgaaaaaactctttgaacagataaatgaatgcagtaaagttgcaagatggaaaataaacatacaaaaatcagtagcatttatatatgccaacagagaatgatctgaaaaagaaattaaaaaattaccaattacaacagctacagagaatatgaaacacctaggaatcaatttaaccaaagaagtaaaagatgtatacaagaaaaactgtaaaacattgatgaaagaaattgaagaggacagaaaaaaggaaaactattccatactcattaattagaaaaattaatttgattcatatgacaatattacccaaaacaatttataaatccatttcactccctatcaaaatactcaagtttctcacataaatagaaaacaaatcctgaaattgatatagaaccacaaaaaatccagtagccaaagcaatcctgagcaaaatgaacaaagcttggagacatcacactatatgacttcaaaatttactacaacgctatagtaaccaaatcaacatggtcctggcatagaaacagaaacattggctgggtgcggtggctcacgcctgtaatcccagcactttgggaggctgaagtgggtggatcacaaggtcaggagtttaagaccagcctggccaacatggtgaaaccctgtctctactaaagataaaaaaaattagtgtggtggcacacacctgcaatcccagctactagggagtctgaggcaggagaatctcttgaacctgggaggtggaggttgcagtgagctgagatcacaccattgcactccaacctgggtgacagggcgagactccatctcaaaaacaaacaaacaaacaaacaaaaccagaaacatagactaatgaaacatcatagagaacccagatgtaaatcacgcatttacaacatttacgcaaatgagccaattcattacgcaaatgagcatccattgacaaggatgctagaaatacacagtgggaaaaggacagtctctataataaacggtgctaggaaaccagataaccatatgcagaagaatgaaactaaccccttatttcttaccatatacaaaaatcaaatcaaaatgacttaaagacttaaatctaagatgtaaaactatgacactagaagtatacttttgggaagcactccaggacattggtctgggcaaagattattttttaagacctcaaaatcacaggcaaaagcaaaagcagataaatgggattacattaagctaaaaagcttctgtctagcaaacaagaccatcaacaaactgaagatacaggccatggagttgaataatgtatttgcaaactgtcaatctgacaaggaattagtaaccagagtatatgagatgcttaaacagtccaatagaaaaaaaatctgattaagaactgggcaaaagattaaatagacatttctctccaggaaacatgcaaatggcaaataggtgtatgaaaaaggtttaacatgactgatcatcagaaaaatgcagataaaaacagtgagacattctctaaccctagtaaaatggcttttttcaaaaagaaaaaataagagatactgctgaggatgtagataaagaaggatgctcatttactgtttgtgggactataaattagtacagccacttacagttcttaccaaacttctaccttttttgtttgttttttgaataaacactttgtggattcctcaaagcatttggctaatttttcaagttctaaaaatgttgatcctgattatttttgccagtttttaaaattgcctttatggaggaagtaatttgctgatgccctcactccatcattttcattgataccattcctttatcttttgcattagagtagaatttaatatcacctgaaacgaaaatatttttatcagcgcttgataataaatgccaattataagataaaaataagatttctttttcattatttaaatccaagttaggatcaagaaccagcaatttcactgctgactatgtgtctaaaataaaggaaatcaatacatcagagaagtatctgtgctcttatgtctattgcagtactatttgcaatagtcaagatatggaatcaatctaatcgcccataaaaagttgaaagaatgaagacaatgtggtatatacactcaataaaatattattcaatcttacaaaagaataaaatcctgccctttgcagcaacatggacagaaatggaggtcattacattaaatgaaatcagccagacacagagagacaaatgtcatatgtttgcactcataaatgggagctaaaaaagtggatctcatgaagatagagagtagattggtggtttaccagaggccaggaaagatagagggtgacgagtaacaaagagaggttgattagtgggtacaaatacttcgtttggtagaagaaataagatctactctttgagagataaggagagtgactatcgtttactctaaatgtacttctattgtgtatcaaaaaaaattaaaaaataaaaacattaaaaaacataaagcaaaaatacacagaaatgatagagaaataaacaatttgacaacaatagttggaggtttcagtacctcactctcaattgtagatggaacaactaagcagaagattacaaggatcaatcttaaaaacaaactagaactaaaagtcacccatggaacaaccatacctggaacattctttgactatccattggcttacaaaacaaggcacaataaatgtaaatgactgagatcatacaatgtatgttctttggcccaaatgggatgaaatttgaaatcaattacagaagaaaatttggaaaaatcccaaatatgtgaaaattaataaactccctaaataacaaatgaatcaaagaataagttaaagaaaaatgagaaaatattgtgagattaaaaaaatagaaacaaagcataccaaaacttacaggataaagataaaatagtacttagaggaaaaagtatagctgccaatgtccatatttttaaaaatccaaatcaataatatgactatcttaagaaactagaaaaagaagagcaaattctagtcaaaaaagcagaaggaaggagataataaaaatgagagtggaaataaataaaataaagattagaaaagttatagagaaaaccagtgaaataaaagatgtgtaattctttaagaaggtcaacaaataatgacaaaactttagatagatgaaataggaaaacaaagaacaaagactcaaattactaaaatcagaacgaagaggaatagcagcactaacgaattttcagatacctaaaaatagtatatgtccacaaattatataacctagatgaaattaactcctcaaagacataatctaatttaaatgactcaagaataaatacaaaatgtaaataaaccaataacaattaaagaaattgtatttgtaataaaatcattttcacaaagggtagtccaaacccagatagcttcattggtgagttctaccaaatgtttatgaaacggtaatatcaatccttcacaaactattcaaaaataaaattaaattaaaaggtagagcaagcacttcctaacttattctgtgaggccaaaattaccttaatgccaaaaccaaacaaagccatcatgggaaaataaactacacactaaaataccttatgaatataaatgcaagatttctaaacaaaatattagcaaactacatccagcaatatatggaaaagaactgattattttccatgaccaaggatttgtcctgggaatacaagcttgttttaacattcaaaaacaagtcagggtaaaataccatctcgatacaataaaggacaaaaaaatacatgatagatacagaaaaagcatttgacaaaatcacacactatttaaaacaaaaaagtaaaaaaaaaaaaaaaaaaaaaaaagacccaggaagctagttatagaaggaaactagctcaaccaaataaaggttatttacaaaagccccaagccaacattatacttaatagtgaagactgaatgatttacccctaagttcaggacagatggatattctcacagtgactgcgcaacattgtactaaaggatctggcccggacaatttggcaagaaaaagaaataaaagtcatccagattggaaaagaaaaagtacaactatctctattagcagatgacataatcttggacatggaaaattctaatgaatctgcataaaaacctcttaaatctaagaaatgaattcagtaagactgccagatacaagatgactaccccaaaagcagctgtatttctatacattttcaatgaaaaattcaaaaattaagaaaacaactccatttaaaataacatctaaaatttaaaatcacttaggaataaatttaacaaaagaatcaaagtcatgtacactgaaaactaaaaactgttgttgaaagaaactaaataaaaggtaagccacctgatggttacgtataagaaaattaatattattaaaatggtaaaattttcaaaataatctacagattcagtacattctctaccaaaatccaagtttcctttttcaaaattgacaaggtgatatttaaattcataaggaatgtaagggaccaagaatggccaaaatcatcttgaaaaagattgaagttggaagaccctgacttcctgatttaaaatttactgtaaaactacattaatcaaggcattgtaggattggcacaaagataaatatatatatatatatataaaaggttgctcagacaatgcactggagaaagaagtcttttcaacagaagacccttctaaaatttggggataatgtggtccttcttagaggcacttgatacctcaaccatatcccatgacggtgaacaaagtttccctggccttgtgaagggtggacagaaacaagccatgaagcaggcctagaatggtatccaagaatccttcggcatgcagtcttcctttctttgtcacttatatccaggttagagatatttttcttgtgtttatgtaaagtatgagaacatgtatcacactatctagattcctacctatatactctatttatattgatgtatttctgaatttaccaccctcctatgggaatgtaatctctcgaaggaagggaccaagggcatcttgctcaacatttgtactattcacctaatatgcttagcatgtcacagttgacagcaaagtatttgcttattgaccaatcaattaattttaaaaatccatacatcaactcatatttctctaaaaatgaattattgatcagccattataagaaagaaaagaaagagaaagcaagcaagcaaggaaggaaggaaggaaggaaagaagagaaagaaagaaagaaagaaagaaagaaagaaagaaagaaagaaagaaagaaagaaagaaaaaagaaagaaagaaaaagaaagaaagaaagaagaaagaaagaaaaagaaagaagaaagagagagaaagaaagagagagagagaaagaaagagagagagggagggagggaaggaaagaagaaagagtgagtcagacaaggagaggtgagctagctttgtaaatatccataatccatttttaactataactaagaaatcacgttgcccaaggccttgggagtccactccttgtaccagcaagccttggatgtcagacatgaaatcaaaagagattattttggagctttaagttttaatgactgccttgctgggattccaacttgcttggggcctgtatcttctttcttttggtcaatttctccctttttgaacaggaatgcttacccaattcctatacctccattgcatcttggaagtaaataacctgttttttattttacaggatcatagatggaagggacttgccttgtctcagacaggacttgggacttttgagtcaatgctggaatcagttaagaatttaggggactgttgggaaggcatgataccattttgaaatgtcaaaagggcatgagatttgcgaagggccagagcagaatgatatacttttcagaatgatatcccccaaatatcatgttgaattgtaatccccaatgctggggtgaggtcttgtgggaggtgtttggatcatggaggcagatctctcatgacttggtacttacttcatgatagtgagttctcatgggatctagtcctttaaaagtgtgtggcacctcctctgctcactctctttcttgctcctgcttttactatgtgacatgccagctctccctttaccttctgccatgattggaagcttcctgaggccttcccagaagcagatgccaatatgctgcctgtacaacctgcagaactgtgagtcaatacaacctccttttttataaactacccattctcagatgtttctttacagcatgcaagaatggcctaatacacagtttaatgaggatgctgtattttgcaaatatatttgtctccccacaaatcacctgatgtgttttgatcagatagctcttctaattaatattagaggatataatttatagaaattaatatatttttgtaatttttgttctgtaaaactattaatatgtagtttgctataattatacaatataagctaagtttttgaaaatttattcacaattttgacagtgaaataaacacaagtatgttggtagcaacattattaaaatttaatctattttttaaaaatggtaatatgtgcattgagaagaaaagtaaaagaccataagagaacacaaagtaaaaatcaaaattcttttacctttctcctccagccaaccaaggaatcaaccgatagaaacaactctgtgtttgtaggtttgaatatgtgttatatgcacttataaattcttccagagaaactctatacacgtaacagaagctttttacacaaatgtttgcacttagcacacattgttctgaaatttgctccccctcacctccccacaccccaatgagttgaatgctatatattagaaaaccttatgtttttatataacactatagtataatgctatttcattattatttgaaattatacataaattataattttcattgaatggatattatagagctaattaacacaaattacttttaattttcttatttagtgttgtcatttatagcaaaattctggtaatactattttaatagtcttctgaaaatctactacccaaacaggtattaacgtaatgtcttgctattgcgttgaaaatgtctctaaataacttgcattgttattgtctctaaataattgcagttactgtctctaaataacttgaaattcggtatattgtgctttccttattttgaaatgtttaaaaataaattggtctttatttacttgcataaatatattagatttttctaagtactatttttatattttacctactttcactgaaatatgtaaacactctcaaagaagtgtctgggaatttttatttgctgatttatttattatatttattttctcctactttcttctcttcttgattttgaaatcctaaaatcccttaattaaactcatttatttcctttaattatatcttcctgtctcatgaaaacatattccttaattttgccttaaaaagttatgcacaaaatgagtttccttgaaaatcaaagagcctcaaacagtaaaacaaatacaaataagcatactgttcaccatttagagttctgatggaagggaaaaggtcagaggaaatggaaaacatgaaactagcacgtttcctggctaaaatgtgtataaggattgtgtcaggtctcctattccatttataagtggaaagtatgttttagttccacacaatactgagtagaagcttcaaagtacagatatgctcaggaacaaatgcatgcttgttacttttaaatcacttgtatatattctaatgttctttgtcctcttggagtctccaactcagattaatattttattacagcagttactgtttttaaaatggacagcctgacttaatctcaatttgttaacagtgatttaaatgaaatatctttgaataattaatattaagtattcacgatatgtaaaagactagttagctaggttaactttgcttaataaaaatgaagtgactgaagtcaatgtacatgatgagctatatttcttgaatgcctttatacttgtatttgttgatttgttggaaagaaacctgaacatttattaaggtttcattatatggctaaagaattgtatgcttttcaaccacagtgcactctgttttttgttattaaagaagaaagctcaacttaactaaaaatggagatttgcttgttagatgattgtttttaagaataattgtgttttgtttctacatgcagaagctaattttaaatacttattgaattaaaaagaaaaaagtatgcaaaattataaaaattttggccagtatttttactgcttaaatagtgtaaatcatttttaaaagtcattaatttgtctatcaggaataatcaatggatgttacacagcatctttctgtctctgttaagaaaggttttagccaggcgcggtggctcacgcctgtaatcccagcactttgggaggcctaggtgggtggatcatgaggtcaggagatcgaaaccatcctggctaacacagtgaaaccccgtctctactaaaaatacaaaaaagttagccgggtgtggtggcgggcgcctgtaggcaggagaatggcatgaacccgggaggcggagcttgcagtgagctgagatcgcgccactgcactccagtctgggcgacagagcgagactccgtctcaaaaataaaaaaaaaagaagaaagttttttgacacaaacaaagcacttgataaaatatttgaaattaagatatttcaattaaaatcaaataataaaatgtgaatctgccaaagaaaatattttgtttatattgtgttaagacatactgtcaacttttcaaatgcatagtatagtattgttaactataggcacgatgttatgcagtagatctctaggtcttatttatcttgcgtaattgaaactttgtacacattaagtagcaacctctcatttccattctccacagtcgttgataaccactattctgctctgtttctgagtttgacgattttagatatttcgtataaatggagtcaagcagcatttgtccttctgtgactggcttgtttcacttagcataatgtccttcaggttaatccattttgtcacctataacaggatttctttcttttgtaagtctgtataatattccattgcacaggcagacacattttctttatccatttatctattgatggagattgaggtttttttatcttggctcatgtgaataatgctacagtgaacaggggagtgcagatacttactcaagatcttggttttaattatatataccccaaactgggaatgctgggtcacatggtagttctatttttatttttttgagagaccttcttactgttttccatagcagttgcaccattttatattcccatcaacagtacagaaaagttccaacttctctatatccttatcaatgcattttttaaaaaataatagccatcttaacaggtttgaggtgaaaatattgtggttttgattttcattgccctgctgattagtgatgatgattataatatttttcatatacctgttggctatttgtatggtttttttttttttttttttggctaaatgtctattcaagtcctttgcctatggcttaatctgcttttttttaattactgcattgtagttcatatattttacatattaacatctaacagatacatggtttggaaaaacatacattttccccgagttcatatgttgccttgtcactctgttgattggttcctttgctttgcacaagctttttagtttaatgtagttctgcttgtctatgtttgttttggttgcctgtgcttttgctattacattcaagaaatcattgccaacacaaatatcataaagcattttttctgtattttttctaggagttttaccgtttcacgtcttacatttaaaaatttattccatgtggagttgatgttttttgtatagcgtaagagaaggatccaatttcattgtttgcatgaggttattcagtttttccaataccatgtgttgaagagattatccctttcccattttgtatttttgtcccacttgtcaaaattcaagtatatgtgacagtacataacaatatatgtagggatttatttctgtactctctattctatttcattggtgtatctgtctgctttgtgctactattatgctattttaattattgtagctttgtaatgtattttgaaacctggtagtgttatgccttcatctttgttcttctttcacaagattgctttggttactcagggtcttttttggttccatatgaattttataattgttttcaatttttgtaaaaacttgccattgggattttcatagggatgttattgaatctataccctgttttggatagtatggacattttaacatgaagttttattcaatgtttactctcatctcagtgaatgagaactggaaaagaaaacttagagcagcatttattctactgattttgattatttctgtttttctgattcatttggaagtgggtgagtgggtgactgaagaatctcagtggaatttttaagcctaccaaaaaaaacagctttactgggtcaaaaattactcagggtaagtcagagatatgactctaaacttatttaaagatcccactgtaatttccagccacccactacaaaatcagccagtgaagcagaaatcatcaaaactatttgagtaagtgccattctgcattctcttttcaattttcttttctagttttcattcactgaagtgaagaataagcattgaatataacttcgtgtgattttatggttcttaagtggtgtccaatttcagaaaagaaaaataagtctctttcctgatgtacttcatgctgctttgatgaccactgccttggtttatgcatttttcttcatatgaatttcagcagtgacctttttatggatatgttattagtagtagtagtagtatcatcatttaagatggagttttgctcttgtttcccaggctggagtgcaatggcgtgatctcggctcactgcaacctccacctcccgggttcaagtgattctcctgcctcagcctccctagcagttgggattgcaggtgcccaccaccacgcccagctaaatttttgtagttttagtagagactgggtttcactatgttggccaggctggtctcaaactcctaacctcaggtgatccacccacctcatcctcccaaagtgctgggattacaggtgtaggccaccacacctggcttatgggtccattattaacagttgctttatatttctatttttcagtcaaaaaaggacttactattcgacaagcattctttatatatgtaaatatacgtataaattaaaattctaagcaatgttcacacacatgcatacacacataaacacacacgcacacacatgcatacacactgagaacgtactatccaccaggaatggtcctaattgacataccaaagatgtataaaaattaagttgatcttcacaacaatcaaatgggtgggtaccattattatcctattatgtggatgagtaaagaaactggactcagagagataatttgctcaagtttgcacagctattgaaagagatttgcctgatttcaaacccagttaggcttattcttcatcttaggcactacataggtaagttttgtgtacaaatattggcattgttttaaattgcaaataattagcgaattgatctgaaattagccaaacggtttgaaaattaatacaggataagattaatacagatccttaatctgaaatgctaaggaacagaagtgttttggattttagggttttttggattttgagatatttgcattattctgtttgagcatcccaaatctgaaatatttgaagcattttactcagcattttgtttgagcatcacttcaatactcaaaagttttaaactgagcattcagaattacaaattttcaaatctaggatgtttcacctgtatctcagtacgatatattcaaattttacagtatttgctggctacatatacaatacaaaacattatgttcaatccaaaacattctgtgttgaaaaatatttaatattctagagagtattgaaaataatgttataacaatcagtaaaaaaaattacactatatatgaatgctgaatgagtctaaaataccaatattaaaacaaaatatttaaattggttaactcccattaaaactgtggttgtggctgggcacagtggctcacgcctgtaatcctagcgctttgggaggccaagttgggtggatcacctgaggtcaggagtttatgaccatcctggccaacatggcaaaaccccgtctctactaaaaatataaaaattagccaggcatggtagcgtgcacctgtagtttcccctattcaggaggctgaggcaggaggatcacttgatcctgggaggtggagggtgcagtgagctgagaccacatcactgcattccagcctgggcaacaaggtgagactccatctaagaaaaaaacaaaaaacaaaacaaaaaaaaaactgtgggtgatttattttttcactttccttttggataggacacactagaaatactgaggttggtaatgaaaagagaaactttttacagcattttttcttgggaagacacctcagagtatggaactctgaacaacacatacataaaaccatagacttgataaaattttcatcatgcttttcaccatttcacctgtcatccacctaacattgttctagaaggaatatgtaatgaatgattgaactttcctttgcatatttgtacacaccattgtttctaagaaataaagccacattgcagcaactaactaattaaagagaatgaatgaatgacaaggatttctagaaaagcatgtttccagatctctgcatataagcgaagtgcctgcctaggtttctttgtgattctcttggtataaatgaattcagaaggtgggaactcttttattatctagttatatcataaagatgatagaatacttcataagatttaaatgtctaaatgcacagaatatgcttttaaattaattatcctcacatgacagttgggggaatatccagtaaaattatcggaaaccaaaattcttacacagcagttcgagaaatgaaatagaaaagtgttgtgaaagagagtagcaaatgggacatgtgccaagtgggcaaatgagggtctaagtcaacatattttactccagaattttctcctcaccacatttcttctcattctggtcattggcagtctgtgacaacaatacttcctgaaaatgtgttgcagctgtagagtaattccatagcagatttattttcctttggcactttttgtaattggcattgaggaaacatacaagaattattccttatcttttttacgttggcaagttttatattgtttaaacgatttctttagttgtgtaaaatatcatttggtagaatattagaagaagtttgggctttcaagtttgttgatttgagtgagaggtatattgaccagttttagcacaaggtagaatttaattatcttggctacttaggaaaaaatacacacagagatacatacacacagacaagcaaatatcttcaatagtatcatatctaatgtatatgttttccttagagccttaactgaaacatacatgctaaattttatacagatattttatctcaatatacacaagttacatatgtggatataatatgaagttgaaaatcctgaagataaccatatatgatgagtttattgttaagatcagaaaatacgaatgttctgaactccacaaaaactcggcaaatgtaatttctaaaaacgcaaaaatgttcaaaagtgtatttactaaactttttagtattactgttgtttttattctttttattgatatatatcagagtcgtatatattttaggggtacatgggatagtttgatacatgtatgtaatgtgaaatgatcaaatcagggttactgggtaatctattttttccttgtattggaaacactatagttcttttctagctattttgaaatatacaataaaatattaacaataaattagaacttattatttctgtccaactgtgttatttactattaactaattctttttcatcctccctacccctctcacactttgataaccaccattctactctctatctcaaggaaatccactttctttgctcccccatatgagtgagaacatggaatgtttgtctttctgtgcctgggttatttcacttaacataatgacctccagttctgtttatgttgctgcaaatgacaagatttcatttttttatggctaaatagtggccagcaagaatacaaaaacagtgctcactattaccaatcatcagggaaatgcaaatcaaaaccacaatgagatatcaactcatcccagttggaatggctattattaaatagaaataaataaaatatgttagctaggatgcaaagaaaggggaacgctcatacactgttacgggaatgtaaagtagtacagccatatggaagacagtatagaaattactcaaaaacaaaacaaaataaaacaaaacaaaaaaagcctgtaatcccagcagtttgggaggtgaaggccggcagatcgcttgaggttaggagttcgaccagcctggtcaacatggggaaacactatctctactaaaattacaaaaattagcttggcgcggtagtgcatgcctgtaatcccagctacttggaaagctgaggcaggagaattgcttgaacccaggaggtggtggttatagtgagccgaaatcatgccaatgcactccagcctgagtggcagagcaagactctgtctcaaaaaaaaaaaaaaaaaaaaaaaaaaaaaaagaactacgatgtaatccatcaatcccattactggctatatatccaaagaggggaaatcagtatattaaagacatatctgcactcccatattcattgcagcaatattcacaatagtgaagctatggaatcaacctaagtgtccatcaacagataaatggataaagagtatctatatgtatatgagtacatatatgaaaaaatatatatgaatcctaaactttgtaagaaattagtatagttttaggcttacagaagaactgtgagggcgacagagttttcatgtgcaccacactgagtttttattgttgcaaacattatacattagtatggtaactttttttacaattaataaacaaatacaagtatattattttaacagtagtctacactttattcaggtttccttggctttagatttctgtcccaggatcccatcaagaataaaattacatttttctgtcatgtctccttaggctactgtgggccatgacaatttcttagaggttttctgtttttgatgactgatatggtttgactgtgtccccacccaaatctcaacttgaattatatcagtagagtggagagttgctgaaaagatacccaaaatatgtaagcaactttggaactgcataacaggcagaggttggaacagtttggagggctcagaagaagacaggaaaatgggggaaattttggaaagcatgattggttctgaaatgtgaggacacgagatttcgaggggttgaggtgaaatgatatggtttggctgtgtccccatccaatcacttgttgaatggctttgataaaatgctgatagtgatatgaacaataaggtccagggtgaggtggtctaagatggagatgaagaacttatagggaactggagcaaaggtgattcttgttatgttttagcaaagagactagtagcacttgtccctgccctagagatctgtggaatattgaacttgagattatttaagatacctggcagaagaaatttctaagcagcaaagcattcaaaaggtgactcggtgctgttaaaagcattttgtttgggaagggaaacagcataaaagttcagaaagtttgcagcctgacaatgcagtagaaaagaaaaacccatttttttgtggagaaattcaagccagctgcagaaatttgcataagtagcaaggaggctaatgctaatccccaagaccatggagaagatgtctccaggccatgtcagagaccttcagggaagcccctcccatcataagcccagaggccgaggaggaaaaagtggttttgtgggccaggcccagggtccacatgctgtggacttggtaccttgtgtcccagctgcttcagacgtggctccaaagggccaatgtagagcttgggctgtgacttcagagggtggaagccctaagcctttgcagtttgcacatggtgttgagcctgttggtgcacagaagtcaagaattgaggtttgggaacctccatctagatttcagaagatgtatggaaactcctggatgcccaggcgagtttgctgcaggggtggggccctcagggagaacctctactaaggcactgtggaagggaaatgtggggttggagcccccacacagagtccctacttgggcactgcctagtggagctgtgagaagagggccaccgtcctccagaccccagaatggtagatctaccgacagcttgcaccatgcacctggaaaagccacagacactcagtgccagcccatgaaagtggctgggagggaggctgtaccctgcaaagtcacaaaggtggaactgcccaagaccatgagaacccacctcttgcatcagcataacctggatgtgagaactaaagtcaaaggagatcattttgaagctttaagatttgacttccccactggattttggacttgcaaggggcctgtaacccctttgttttggccaatttctcctatttaaaacagctgtatttacccaatacctgtacccccattgtatctaagaagtaactagtttgattttgattttacaggctcataggtggaagggacttgccttgtctcagatgagactttggactgtgcacttttgagttaatggtggaatgagttgagactttgaaggactgttgggaaggcatgattggttctgaaatgtgaggacacgagatttcgaggggtcagggtggaatgatatggtttggctgtgtccccatccaaatcacaacttgaattgtatctctcagaattcccacatgttgtagggggcactcagggggaggtaattgaatcatgggagaacagtcatttccatgctattctcatgatagtgaataagtctcacactatccagtggttttatcaggggtttcccctttgcttgctcctcattttcccttgctgctgccatgtaagaagtgccttttgcctcccgccatgattctgaggcctccccagccatgtggaactgtaagttcagttaaacctcttttgcttcccagtcttgggtatgtctttatcagcagtgagtaaacagactgatgcaatgacctgagagttttgagggggtactcatcatgtacttcgcagaatgctcaatcaggttttttctaatgcttttctcatcataagacataggttattggtttttaaaaggaagaccacaaggtaaagtgtaattctcatcacattacattaaaagtagatactgtaagtataatctaccactgattttattgtgtatgtttaaactgtacaacatgtcttgatatacatagtgaaataattagcataatcaagcaaattaatgtatctatcactttacattgtttttgcgtgtgaggtaagagcacctaaaatgtattactgttgatgttaatcttgatcacgtagctgatagagtttgtcattttccttgaccataaacttacttttttccccctttctacactgtagtctttgggaggaagtcactgcacagcctacatttaaagaatgagggcttattctctacctccttgagggcagagtgtaatgtagatactcatctatgttacttttactctttatgtaaattacttcgaaattttctgcatcagagatttgtctcttctctcctatttgtttattcatttatttatattgcaacatatttgtatggactcacaaatatattttttaagctggggtttatattcagtatttaacactattttgtttttcaaggtgttctagctttggccattgggagctattttagttggctcctgtgtcttttgtgtgtctttgacacaattctatcattgtgagtatttctgtttgtttgttttggttttttgcacttgcttgccttctacccctacaaggtattccaagcacatctcctatatttcttgactcaatcctagaaccagccatttctccaaagattcatggttccttttaacagagaatagtattaggaaccaagatctaagtgctaagtgggcttattgctacttcagtgttgatgcttccagactatctcaactgacagagaaaaaaaaatgtgtgagtatattaacccatgtatatacacatattaataaatatatctatatttctatagccagaaatatctatattaagcaaaatgtaagttcatactggtgtattgaagtctactgtaataacacatggataattccagccgtatctccttggtcactgcaatctctcgttccaaaagtaagaaaactgcctgtcagccactgtcagacaatcatttatatagttgttcaactccattatgtttgtatagtggtatgaggattgttaatctgtacccctgtgtaaacacccttttcaactagaatatggtgcttatgtagtttcttttgcctttactattacagactcatctccatttattttcaaagttacttatgtcaccactgttatcctccactcccttcagataagatatttcatacatttgtaatacagttagatattttttgtctcagcctgaattccatcttggagtctcctgacctctaaatgactttttaaaaaatctgtgtaaggttaggtttactttttgttttgtaaagttctgtggattgcaacagactgatagtgtatgtactcaatatttcagcatcacacagaataatctcagctccctaaaaaacctctgtgttccatctcttcactactgtcacccatcccacaaacccccactgaatgcctggcaaccactggtatgttaagcatatctatagtttagcctttttaaaaaatagcatatgaatataatcatatggtaagtagcattttccagctggatagttttccttagcaatatgcatttaagattcacccatatctttgcatggcttgacacttcatccttttttattatttaatagtatttcattgaatggattttttgtattatgcttatctatttacttattgaaggacactctggttgcttacagtttttggtgattatgaataaaaatacaataaacatagctttgttaagaaattgtcaaactgttttccagggtggctgtatcatttgcagttccactagcaagaatggttgctcagcctccttccctgtgattgatgttatcaggtttatttgggagacaggagggagctcttagccgcagtccaacagttgtgtagtggtatatcatcattgttttcatttgaagcaaattttcaagcaaatgatgtatcattttcttaggtgccatctgttacatttagtaatgtaacggtttatatattttgctcatttttaattgggtcttttggtttaatattgctgacttttagtgttcctagcatgctttggatactactcatttatcagatatattttgcaaatgctttctccacgtgcatggcttcactttttattctatcaacagtcactttcacaaaatatttcatttttaatgaaatagaagatcaatattttatttcattaatcatccttttgttgttttatctaaaaacttgtcatcaaattcaagggcatgtagattttgcccacgttttcttctagagcttttatagtttgtcattttacatttaggtctatgacgcattttaacttaatttttcagtaaagtgtaaagtctgtgtttaggattattttatcatatgaccatccaaataagtctatctttactccattgaactgaatttttgcctttgtcaaaaatcaattgacaatatttgtgtgggtctagtatgctttattctattgattcacatgttttgttttgttttgtttttcctttggcaaactacactgtctcaattatagttgccttatagtaaatttaaaaattgggtagtatgagtcctccaactttgttattctttttcagtactgtgtgggatattctagagcctttgcttttccatatgaacttcagaaaactattatatctacaaaatagttttctgggttttgactgagtttgcattgaatctatagatcaaattggcaagaattaacatcaaatataaatatatgtatattttttatttaatttcaaatttaattattattggtatttaggaaagcaattgactttgtacatttaaaatgtaccatgcaatgtgctatactacttattagtgacaggagttttttggtggattctttgaggttacttacatagacagttacatcatttgtaatgaaagacggttttatttctttccttttcatagtttataaatagaatttattttaatgtcatattgcacaaactaggactttcagtatgttgtttaatagcatgggaaaacatctttgccttcttctgaatcttaggagaaaagtgttcagtgttgtaagttaagtatgatgttaattgtaggttttgtgtaaatgtatcttattgaggtgagaaaattccccttttaccctaggttttctgagattcattatcataaatgagtgttgagttttgtcaaatgcatttttgatatcaacccatataatcatatacttttttctttaacatgttgatatggtggattacatttattgaattttttaatggtgaatcactcttgtatacctcaatccttcatttgtgttgcaatgaaaaagggatgtattgttattggtctgtttcactttgttacgatatatggttgtccatagtgtctactcatgccccaatatcttgtagatatttaaaaaataaaacagctctttaaatttttcctatacccttgatttgttgagagtttaatgaagaaacagaaaacactttgaatattttaagcaagaaagaattcattaaagtaagtagatgcttacaaatttattgacagaggaaaaggagcaaaagtcagggacggccaatgaagtatagatctctcacagcggtttccatagaagaacgttaattagtatagtgactaataataataaaaatagctaatctttttcaagaatttaccatgtgacagaaacatagatctagggccgggcgcggtggctcacgcctgtaatcccagcactttgggaggccgaggcgggcggatcacgaggtcaggagatcgagaccatcccggctaaaacggtgaaaccccgtctctactaaaaatacaaaaaattagccgggcgtagtggcgggcgcctgtagtcccagctactcgggaggctgaggcaggagaatggcgtgaacccgggaggtggagcttgcagtgagcggagatcccgccactgcactccagcctgggcgacagagcgagactccgtctcaaaaaaaaaaaaaaaaaaaaaaagaaacatagatctaggggacacattccccttttccctagtggaaatcaaggtagaccaagaccagtagattaaaacagaaatcagagatgtgctatggtttggccctctgtcgccacccaaatctcgtctagaattgtaatccccaactgttgagagaggaacctggtgggaggtgattgtatcgtgggagccatttcccctgtgctgttcttgttatggtgaatgagttctcatgagatctgatgtttttaaagtagcagtttcccctgtgcacacacacactctctctcctgccaccttgtaaagaaggtacttggttctccttcaccttccaccataattgtaagttccctgaggccttcccagccatgcagaacagtgagtcaattaaacatctttcctttataaattacacagtctcaggcagttctttataacagtgtgaaaacgaattaatacaaaacttcaatttaacaattaaatcatgtgataaatacagtcctctcatcgtgttgcttaaaattagggatcagaatctcaacgagaggaatagaaatattgcctgatttcagacgaacacccccttgtattaatttccagaagtcagaaactatagtctataagccaaaattgggctcaccatgtgtttttatatggccagcaagccaagcatagtttctttatttttaagtgattgcattttaatgtattataaatgcttacatcatatcctcaattttgtctcctggaccacaaagcctaaaatatttactacatgaatctttaagaaaatagtttgctgatctcccgatttagtctaccaaactacaattagtgttgttttcatttttgttctctatatgcatgttgccatttttacacttcttcagaaaaacattgagaatttttctacactcactatttccatttgtgcctaaggacaactttttctttttcttctctttttttttgaagaaatttgtttatgaacttagataaaatttatagctttgcttgaaaatttggtacttactacctttgcaattctctttatttattattattacttttatttttccataagttattggggtacaggaggtatttggttatataagttctttagtggcgatttgtgtgattttggtgcacccattacccaaggagtatacactgcaccatactcggtcttttatccctcgcccctctcccacttttcccctcaagtcccaaaagtccattgtatcattcttatgccttgtaatgtttgtttttccattccagagttacttcacttagaattaaatagtctccaaacacatccaggtcactgcaaatgctgttaatttattcctttttatggctgcgtcgtatttcatagtatatataccacagtatgtttattcactcattgattgatgggcagttgattccatgattttgcaagtgtgaattgtgctgctataatcatgcgtgtacaagtatcttttttgaataatgacttattttcctctggagagatacccaatagtgggattgctggattaaatggtagttctacttttaattcttcaaggaatctctacactgttttccacagtggctgtactactttacattcccactagcagtgtagaagtgttccctgttcactgcatccacgtcaacatctactgttttttgattttttgtttatggccattcttgcaggagtaaggtgatatcacattgtggttttgatttgcatttctctgatcattagtgatgttgagcattttttcatatgtttgttggccatttgtataccttcttctcagaattgtttattgatatccttagtccactttttgatgggattgttttttacttactgatttgtttgagttcattgcagattctggatattactccttcatcagatgtatacatcatgaagattttctcccactctgcgggttgtctgtttactctgctgactgttccttttaccatgcaaaagagttttagtttaattaggccccagctatttatctttatttttattgcatttgcttttgggttctttgtcatgaaatctttgcctaacccaatgtctagaaggatttttccaacattatcttctagaatttttatagtttagttcttaggtttaagtccttaattcgtttggcgttgatttttgtataaggtgagagatgaggatccagtttcattctcccacatgtggcttgccaattataccagcaacatttgctgaaagtgatgtcctttccccactttatgtttttgtttgctttgttgaagatcagttggctgtaagttttggggtttatttctggcttctctgttctgttccattggtctatatgcctgtttttcaaccagtaccatgttgttttggtgactatggccttatagtatagtttgaaatcaggtagtgcatgcctccagatttgctctttttgcttagtcttgctttggctatgtggatcttttttggctccatatgattgtagaatcgttttttcaaattctgtgaagaacaatggtggtattttgatggggactgcattgaatttgtagatagcttttggcagtagggtcattttcacaatattgattctacctatccatgagcatgagatgtgtttccatttgttcgtgtcatctatgacttctttcagccgtgttttatagttttccttgtagaggtcttttggcacctggttatgtatattcctaagctttttgtttgtttgttttttgcagctattgtgaaaggggttgagttcttgatttcaacctccacttggtcactgttggtatacagaagagctactgatgtgtgtacattaatcttttatccagaaactttgctgaattctttcatcagttctaggagctttctggaggagtccttagggttttcaaggtaaacaatcatatcatcagcaaatcatatcatcagtgacagtttgacttcctctttactgatttgggtgaactttatttctttctcttgcctgactgctgtggctaggacttccagtactttgttgaagagagtggtaacagtggtcatccttgtcttgttccatttctcagagggaatgctttcaacttttccccattcagtattatactggctgtgggtttgtcatagatggcttttattacattaaggtatgtcccttgtatgccgattttgctgagagttttaatcataaactgatgctggattttgtcgaaggctttttctgtgtctattgagatgatcatagtgatttttgttttaaattctgtttatgtggtgtatcatatgttaaaccatccctgaatccctggtatgaaactcacttgatcatggattacttttttgatatgttgttggattcagttagctagtattttgttaaggattttagcatctagcatctatgttcatcaaggatattggtctgtagttttcttttctggttatgtcttttcctggttttggtatcagggtgatgctggcttcatagaatgaattagggagggttccttctttctctatcttgtggaatagtgtcaaaaggattggtaccaattcttctttgaagatctggtagaattctgctgtgaatctgtctggtcctggacattttttgttagcaatttctagattaccatttcaatattgctgcttgttattggtcagttcagggtatctaattcttcctgatttaagctaggaggcttgtatttttccaggaatttatccatctcttctaggttttctagtttacatgcataaaggtgttaatagtagccctgacttatcttttctatttcagtggtgtcagttctgatatctcctgtttcatttcttagtgaggttttttggattttctctcttcttttcttggttaatcttgctaacagtctgtcaattttatttatcttttcaaagaaccagctttttattttgtttatcttttgtatattttttgtttcagtttcatttagttgtgctctgatcttggttatttcctttcttctgcttggtttgggtttggtttgttcttgtttctctagttctttgagatgtgaccttagattgtctgtttgggctctttcaaatttttgatgtaggtgtttacggctatgagctttcttcttagcattacctttgctgtatcccagaggttttgataagttgtgtcattcttgtcattcagttggaagaattttttaatttccatcctgattttgtttttgacccgatgctcattcaggagcaggttatttaattttcatttatttgcatggttttgaaggttccttttggagttgatttccagttttattccactgtggtctgacagagtgcttaatataatatcacttttcttaaatgtaatgaggctcgttttatggcctataatatagtcaatacaggagaaagttccacacgctgtttaatagaatgtgtattctgtggttgttggatgaaatgttcggtgtatatctgttaagtccatttgttccaaggtatagtttaaacccattgtttctttgttgactttctgtcttgatgacctatctagtgctgtcagtggagtattgacatcccctactattgttgtgttgctgtctatctcattccatttcttaggtctattagtaattgttttattaatttcagagctccagtgttaggtgcataggtttaggattgtgatattttcctgttggacaaggtcttttagcattcttttttttttttttgagatggagtctcgctctgtcacccaggctggcgtgcagtggcatgatctcggctcactgcaagctctgcgtcccgggttcacgccattctcctgcctcagcctcccgagtagctgggactacaggtgcccaccaccacgcccggcatgcttcccttcccttaagggtttgagcatctgtggtggccaaacagacaagccacacgcctgtcacatgtcctgcaagggaggtgggggaactctcccatttcactatcaaaagaatttactgttcgttccagtcaatacctaactatagggcgctgacctcctttatttatttttgacagcttacaattgtcaattatttctctgatcctttaaaaggtagtcttcccttaagggaaggggagcatgcagacggacaggtgcaggagacagaatgagtgctcctggtctctagccccacagcagcgtccaggagtgggtgcctgcagctccgaaatcacaatggggtgagtgttacagtgcactctcttagatttaccatctatggatggcttaagtgttaaccagctcaatgtcctcttggtatccaggtccttgtctgacatccaggaagaatcaggtcacacaaggacttgaaggatgaatgcaggaatgcaggggttttattaagtggtggaggtggctctcagcaggatgaatggggaactgaaaaagggatggagtgggaagctgatattcccctggagttgacaatccagcagctgatcacctctctgactgcccccagccgattcctattggcgttcaggtgctccttttcttctctttgccccattttcctgccatccttctgctcttctgttagtcctctcgtctgcttgtctgcttctggagccttgggtctgggacttatatgggtacagaatagggggttgtggcaggccaaaagacaacttttgggtgccaaaacaggaatgtctgttcccatttggggccacaggtttccaggcttgagggcagggtctttgccagggaaccgccctcttctacccagtatttccctgtctcctgtccatatcagtagctgagatttctaaggctggtattttaaaggggttgaggtaaccctagggacatggtccaggatcaccatggctagagtgtgatcaagttttggtgtgctgggttgaacagagacttttgcagttctcacccagttcccattatactaaagtttactgtacttatctaccaacttgttgactttcttgtccaacttaacacttggagtgttaagattgcagaagcatctggaaccccaaatattctttgaggaattttctttgtactgatacagtctgtaatatctggtgtacccacctactataggttgtgtttcacagagatcacgtgggtttttaggggcatatagctgaaagtggactcaagtacagagagtcactatttgtagcctcaaaccattgtttccttcttagatgtaagatttttccttatgtgtttatttacagactccttcctcatttttttttccttaggaaatttctaacttttttttaccttccatgctttctgttgaatgcattcctttatttatttattttttattttagtttaattttttgagacggtgtctcactctgttgcccaggctggagtgcagtggtgcaattttggctcactgcaagttctacctcccggttcacgccattctcctgtctcagcctcctgagtagctgggactacaggcacccaccactacgcttaattttttgtatttttagtagagatggggtttcaccatcttggccaggatggtttcaatctcctgacctcgtgatccacccgcctgggcctcccaaagtgctgggattacaggcgtgagccaccatgcctagccacattcctttatttctatcaagcagatcagtgtatgttagaaagaaccttaattttggataagatttttacctttcatgggctaaaagtctccattaaagaaaattaatagataaatatgttaacatcttgatattagtttatttgaacctgagctcatactcaatcagtgttttcagcaatatttaattctgtttttgtaggtttcacattctacttgcaaaataatggatgattattacctttttattatgatgatgtttgtgagtgaattttcaggcatttttattggaatttgtgatcacattgagagccataaaatattttacatttttcagatagaagtaatagtacggggctgggtgcagtggctcacgcttgtaatcccagttctttgggaggccaagatgggcggatcacctgaggtcaggagttcaagaccagcctccccaacatggtgaagccctatctctactaaaaatagaaaaattaaccaggcatggtggcgcatgcttgtagtcccagctactagcaaggctgaagctggatgatatcttgaacccgggaggcagaggatacagtgagtcgagattgtgccactgcactccagcctaggagacagatggagaccctgtctcaaaaaaaaaaaaaaaaaaaaaggaaaaaaaaagtgaagtgatagtgggacccacttctgaaagagatcctgttgcatccttatccctctgttagttctctcatatatgcaatggggagtttctgttaagttttttgatttatgaaatgatactcaatgccaggaatgacactaattaaaatccgtatatttactcatttgaatcttgacaatcattcttatttagatgaacctcattcaaatagttaatatttaacatgttttcttcaggaatttttattagcaatgagaatgttaattgaggatggctgggctggctgggcttacattccataagaattgtacccttttattgaatatttaaactaagtttaagtatatataaaagaacagatattgcaacatgtttctggtattaatttccaaaaaacttttttatacgtgaaattatgaaatggtacttcctatagtctagtactaaagataaaaaaaagtcttttatcattcttactgcataaaaatgctttagtgcgtattgttaagaagaataaaccaatccactttagtttccttatccctgtgactcatttatgcacttgatatttctcagtgtagccctacaacaatgtctttaaattatgtaattttctatgaattcaacaaaagaaacctaaaagttgactctgagcattttcttggccttcctcattttgtggttgattgtggcctacataatttccctgaaatgagtcagcttccttccaaatagtttaggattccaagccctctatatagcctgctgctcaacacttgttctttgctcatttctactgccaatatattttgttataaaaatgaaccacatttttcggccaataataatatatttgctataaaggttatattgccaatttcactaggttccataaagaaccttatcatcaccactgctatttctctaaataaatatatgcatgaaaattgtgtagagggagaaagttttaaaacattaattatgtatacagaaagttccaactgatatctagcaaaaacatgaataatttttcagtttcattcacctagtgtgcaaactaggatcaatcataatgaaaaaaaaaccctcccccaaaacagctacagcttcatttttctcgtcttctctgtgatgaaggctccaagttgacacagatggtaataatagagaggccagttctgagagctgccaactgcgtcatcctgacccctttcaacacacctcatccgaaacgataactataattcctgtcctacattacactctgctgtagtgccacacatcttttaaaagtattaaggaaaccattcagagagcattattggaaaataagagagggcaactattctggtcaatcaagtaatgagttttaatacttcccagcagttacctaaaatcccagctgatttcaaagactaagaggtaaaagggaaaaggctcaatggcagagtggggatgggctggggagaaatcctttagagctaatatgttatctgacagtgttatcttcctccacttttatctgcagtatttcaacatacataaatctattatagtgttggagaaagggcccactgtctgaacctttattcttttaggagaaacatccatgtaaagctctttgtagattaagcaattcaattttatacatagagaatgcctaattggccaaaaaaattctattctacttaaagctataccataattaaaaaatagtaaatagcaagagcgctttaaaataaatttgatcaatgaatattccttgtccatttgtataaaatacttaaataaaaagttttgtaaaatgttatgatatttatctgctctaaaatattttactattaactcaaacttttaccctaggactgattcatatttacacaacttcaatgttgaagtaaaatcctacagcctatcatgtgaatttatacaaatcatgtatgtagtatgtagggttttttctttttcaaattaagaatatcagaaaatacaaaacaaaattttatttattattcattatttcagatctgcagtaaacagaatcctgctcagataatttgagaaattttccaaataagagtatgaatgaacaaatgttgagacatctagagattagcagctgtgggaagtcattgccagctctaagctgaagagcaaaggaggtaatagcactacaggatctgaagagtaatagagccttaaggtagtggtcttcctcattggaactgcagtcattgaaggtatcgaccactgacagacaatgctgccaaatatgatagggagtggggaacaaataccccaaccttccctcttgccttgtgattggcatgccattgctccccatttcctgaacccagcaatctgaagccaaatggaaagaaagtcagtaacacaatccaagggagtcagcctctcagaacagaaaaaagaacatgaaaagacaaagacttgattgaggtcagaaggcaaaataagaaacccaacacatccatattcccaacacaaagacttgaccacagagaattaatagctggtaaattttgcctacagctacttaacaaaaaataaatatcactctatttggatatgcatggtaaatttctgcatataccatggcatatggattttcaaagatgtaaaaaaaatgcataaaatcacaaataggaagaaacaatcattccaaatatttacacatgaaagtaagcatcactgtgatggttaatattgagtgtcaacttgattggattaaaggatacgaagtattattcctgggtgtgtctgtgagggggttaccaaaggagattaacacttgagtcaatggactaggagagacagacccacccttaatctgggtgggcaccgtctaaccagctgccagaacagctaggataaaagcaggcacagaacgtgaaaggactggtctggctaagttatctgggctccatctttctcctgtgctggatgcttcctggccttgaacatcagactccaagttattcagcttttggactcgtgaacatacatcagtgatttgccaggggttctcaggccttcagccacagactgaaggctgcactgtcggcttctctacttttgaggttttgggactttgacttgcttcctggctcctcaacttgcagatggcctattaggggacctcaccttgtgattgtgtgggtcaatttcccttaaaaactccccttcatatattcatctatcctattagttccgtttctttagagaaccctgactaatgtaatcattaactatgagtgaacctcatttcagatatttttctatggatatacacatatggaaaaacagaaagacaaagataaactttttgttaataaacatgagactatactatataaagcaattacagtaaaatcaatgaatttattttactttaatttataagaataaaatatctgaaataaaggagttcaaataaatgtttccttaccacagtgctgttttatattttaacacaacctaaagtttagaaaatattttactcagattaaaagatacgcatcggtaatgtaatcatagttttccatttaaaaaatctattaactttctgctacaaacaaggaagatattagaatgtagcatatttccatccatcttctgcttatatcccaacgtttgtaaaatatattattctatttacattattcgggtttactttttatattgttacattctgcaaaaatgtttagttctattttcaaggggaatagatttttatttgtgtaggtgttataagactgtctttacttgaattctttgagtcttacattccataaattattagggtctttcatgttttcaaatgtctccatgccttgttgatacttgaactctaacttagctggctatacaatgattgggtcacatttctttaccttttgaacttttagaagttgcttcgttgtctctagccacaacatactgatggctgtggagaaaatatgggactcatctgatttgtcttctctgtttgtattttctttctctgctctagatgcctgatgaatgatacctttaccttgaaatttaatagcctgaaaaggttgtcttgatgttaggtaacatgaattaaaattttatggtacaccatctgcagtttaagttttttacattctttctttttacatctcaattttaagaggtgttgcaaagaaatcactgtaaatacagaagtagccctcatgttccaccaaagtcaattagagtgtttcatggatgtgcatgaacctgtaaatgtcaagaaagttaaaaaactgaacccaggccgggcacggtggctcacgcctgtaatcccagcactttgggaggccgaggcgggcggatcatgaggtcaggagatcgagaccatcctggctaacacggtgaaaccccgtctctactaaaaatacaaaaaattacccgggagtggtggtgggcgcctgtagtcccagctactcaggaggctgaggcaggagaatggcgtgaacacgggaggcggagcttgcagtgagctgagatcacatcactgcactccagcctgggtgactgagtgagagtctgtcacaaaaaaaaaaaaaaaaaaaaaaaacctgaccccaacaaaggggtcttacaaaaaacaaggaacaaacaaacaaaaatgttacaaccgaacaacagacttttgagtcatgtttcaggccaagaggtgatgagttactgtagttgcttgagctggttggtgaaatattacctggcaacaaaactgaaatagaaggtggcttagtaaaatgcagattcagaatgagtgccttaaggttaaggcatataagaccaaactgattttctttttcacgaggtcttcaggtaaggccattgtagaagataccttgtttgcgaacttcagtaaattacttcacttgtctcatattttcattttcaggatggaggcttgagattgaattgtagtgcaattaggtaaatttttacccattttaaatataatattaaaatattaattataaattaccttatttgaatctggaataatatttattgcagggcatataatctaagctgtaaacgtcctgtcagaagacaacatattcatcttgctaaggtataagctatatgactggcactgtgctcaactcagagtcattgaatgaacagtatttatttaatctatgaatgagagcacttcaagtatacagaaagatatctcaaaagattcagccttacattgctcataacttcaatgacttagatgaaaacctcctgaacatttttatcagttgtataggtaccccaaatcataagggaatgtttatcaattagatgatgaaatggggatgcaactacatcatggcaggctaaagcaatagaatgactttgacaagaggaaattacatagaggcacctgagtctcctaaaccaatttcaaaggtatgagaggggggtgatataaataaatagttgatagatgaaaaaactcagaagttatagttgacagcaattttaatataatatgaaaaatgtggttggacttttagggaaaaaaacctaataaaatctaatggaaattagtggtccactcatttctccacctaggatgttaaaaatatttcttctgggtatgacatcccagaagaggtgtaggccttcgaagtcatgctcagaaggaagatatcagaggggttaaaggaaatttgatgccaggtgtaaaacgtatttcaaagaactgaacatcttacactaagtaaaattctattgggtgaaggccaaatatctccaaacatatgaagaggtgtcatgtaaaaagatattacatgtgatctctgtagccccaggggttcctgctgatctaggacatatgtactgaagttatgaacagaaatttaaaaatcagagaaacctaaacatgagaagcatcacgtggacggctctgatgtgtaaatcctcatcactggaagtgttcgaaagaggcagaataacccctttaaaaggcttttaataaagttatcaaaaattgtaaaaataatgaaattattttgaagtcctttctaaactaaaattatataactattaatacatcatttcttccatttttttaagaatgtgaaaaataatttaacctaggctacctaggtgtaaatcacgtttccaccagtccttagttgtacagtattgaaaaaagtatgtaaattgttactgtttatgtttcttcacctgcaaaatgacaataaatgggttattgaggctatcacatgaattaatatctggaagatacagtgaatgtcagagtaaaaatgcacatgcaacaaaactagtttttaatattttgtggaaaacattgaaaaatttgactcagcactactgttcaatccctgcagaaaactagattgccagtggaagagtcttgagagggacaaaatgccgaaggacaaagaagagcaaactcagtcacctaacaataaccacagcacctccatttgagctatgcctgttatagagtgtctcatagtcactggtctatagtaagtataaaaaaattgtgatcaagtgaatatatacattaatcaattaatatcaggcttctctataaaatttaatacttatgaaatgtgtctggtgctgaaatacattgtaaaaatatcccactaatcttaattcaatagtttgttcatcagaaatatcattaagatatccattggtaataattaataataaaacttgacgcagacttagtgcagaaccagggccatgaacccttatgatgaatgaagaaaggtatcacatctttccacccctacatcccattgatgacagttgacaaagtaaagagtaaaactgaatatacggtggtcctccagctagtgtccctggggtcaggtccctggagtatctggatccttctcgatttcaaccctgattttacacttctcaccattttgcattctttgaaattcttgtcttttagtgtttatgtcaaagatctctctctctctctatgtcaaagatctttctctctctctctctcacacacacacacacacacacaccactcttttcattcttacatttaacttttattttcatcaaaatatgtacatagttttgagttaaatagatttagattttttccataaaacaggattataccaattcaatctcttttttcctccactttcaaccatgttaactaattattttgatatttaccttcagaagtcaaacaacatacacttagcatcgtatgtttcctcccattttggaaagtgaagatttatctctcaactctctattcagttctcattttgggattttctgtaagcatgattctagcattattttaaggtaagtttaaacaaggtaggatctttttgtgtttgttcactgatgtatctcaagcattcccagcagtaaagataggtacaagaaagatatttaataaataatttttgaactgatgaatgaatcctaactttttttgtcttttacttctctcttttatttgactatcttgttcatttagcctatgtcttcctctttcttgttttattccctttgtgggccgaacacaacccccaaaagctttaaaagaaagagtgtatacatggtttttaattttgtttttgtgttttaaaacattaaatgtatcaaaatgcttttattctatatttaaacttgaataattctttatctaggtataggattctaggttggaaatcatattcccttagaattttgaagttattgatctattgttttttaatatcttcactgtactcttacttttggtgagagcttggcagggtttggaaatacagattgaaagtaaatttccctatgatagaagtacttgctttattgtattctagttttagcatttaagtaaaaatgcccatggcagtcatcattaaccttgtatgtgtttgttctttttctctggaagctatgggctctgctatttgctccagtgttccaaggccttaaaaacctttgtcttagtgttcatttatttttaaccattgtactggttaaaatggacccttttaatctgaacagttttatgtgcccaattctcagaaagtttcttcaattgactggatgattttctctcttcatttttctctatcaaattatttggatattgaatctactacactgattcattccaacattacaattctttacctttgatttttaaatccttccagtttgtactgtatgttgtatgaggttttctcaagtttaccttccaatctttgtattaattgtttcatttctacctgtccagttctcaggaactttcatcaattgactgaatgatttcctctcttcatttttctctatcaaattacttggatattgaatctactggtttgattgattctaacattataattctttacctttgatttttaaatccttccagtttatactgtatgttgtttatcttctaatctttttattgactgtttcctttgtattatagatgccatttctgagaccttttctattctctggtgtttgtatcatcctcttcttgttttatggatgcattatcttctcttatctctctgaggtgattaaatggctaaaatgcaaaactttgggaaaggcttgcatgagtctttcaggtagattcattgctctctgatggatatccaaagatatgtgattatatctatctgttttatgtgtattctattataattttcccattatttaatgttatctataaattcccaagctgtaaatcttagtagaactcacattatatttatatgtgttcctcaccatactctaaaatgctcaagtcataagctttcttaatcttttttgaataaggaatggaaaaattcacacaaaatacatacttgcttttaccttgtttataattctatctttagcagtcagcaaagtgcatgttatgctttatattctcaggatacaacttaccaacaaattgatggaatttgaaagagatttttttttgcttataaaacattttggtggccctaaattttcaagcatgtgctttgtacttgggaagcaattcacccatttatttggcaacagtatttctttcatatctacttggtgctatggagaagtaaattaaaacaaagtttaaaaaatcttgtgaatttaattatccaattacttagttcattacgaatatgtgcaaatccgaatcgaataaataaacaattccatgaggacagaggctctgctattttacttgtaattacacttttggctctcatggcatctatttattgtcagacattgtttttctacgtagatacagtctagagtagataattattagatgcagccaaaatttaaaaagaaattcaatgaaagaaaccttgttttaagctgaagattgcacaaattacttcttctctcaataccgtctgatacccaccattctacataaataatttgtacatagttgctcattgcctaaaaaaaaaaatgtttgcccgtgtgagacatcgatgcatcaatagtgcttaattataatgacagcttcaagccacagtatttttccacatttttttagttctatgttctcttaaaactagtctacctaggctgggcgtggtggctcacgcctgtaatcccagcactttgggaagccaagggcaggcggatcacaatgtcaggagatcgagaccatcctggctaacactatgaaaccccgtttctactaaaaatacaaaacattaactgggcgtggtggggggcgcctgtagtcccagctacttgggaggctgaggcaggagaatggcctgaacccgggaggcagagcttgcagtgagctgagatcgcaccactgcactccagcctgggcgacagagcaagactccgtctcaaaacaaaacaaaacaaaacaaaaaaaactagtctacctcttcccttagaaactttgcatcatttaacaacttgtgttagagagaataatagcctcccaaaaatgcctatgacttagtcaccagaatctattcatctgttaccttacatggaaagcaggactttgtgggtgctattaaattcttgagatggacaattattctggattatctagatagataacaatctaatgatataatctctttagagcaggaaatctttcctagctgggccagagagcaagatgagacaggaaaaaggaaagagtttcaaagagtgagagggacaagctttaatgttgctagctttgcagatggaagaatagggtgaaaggtgaggaatataggtggttccaggagctggaaatggccctcacttgagacagccaaaagatgggagcctccaccctacaccactaaggatatgtactcacccaacagcctaaatgaggtaacaggctttttctagagcctcctgagaaggatacagcctgcttgaaacctttgctggattttggataatacatttgtgttgttcaagtcattaaattgactgtaatttgttattgcacaatagaaacctaataaacaggcctgtcacggtagctcacgcctgtaatcccagcactttgggaggccgaaatgggcggatcgcctgaggtcaggagtttgagaccagcctagccaacatggtgaaacgccatctctgctaaaaatacaaaaattagctgggcatggtggtggatgcctgtaatcccagctactcaggaggctgaggcaggagattggcatgaacctgggaggtggaggttgcagggagccgaggtcacgccattgtactacagcctgagtgacaagagcaaaactccatctcaaaaaaaagaaagaggaagaaagaaaaaaagaaagagagagagacagaaagaaagcaagcaagctaataaacaccataacaatgcttctttctctgaattcatttagaacttgctaagcatcctaatgtagttatcaatgaggaatcctatactgcattgtaagaagacgtatgaatgttttaaaaaatatgtttttacaagtctctagtgtttgagtttattcaggtctattggttcaagggttctagtattaaagtcacaagtgattaagcgccacactacacaattatctatccattatttagcacagagatttggaacagaggaggcaagtcagtagaaaattgtataaattttagtactttttatgatttccttaaaaaacagaaaataaatgaaaataaaatatacattaagtaaaaagaggtataaatgtaatgttactatatatttcatttcttgagtaacatatgaaagatttttttaaagtcacatttaggctaagacaattttctttaaaatagctctgttaaattttggacaaagtgtctttgcctttctctcattcttcattttctctttcattttcttttttcatctatcctaagtacagaagtcacaaaatagatagcataaaatatttattgagctcttcaaatatccattcaaaaattctctgataaagacaattttcaaagcaccaccaaagagagatgactcaaaggaccagcaagcaatttaaatatctcatgtaatacttaattttaagtatctctttgcatatctatcggtctcattattttccaaaagtctgaccctggagttctgatacccaaactcatttgaatgtatggatttttccttcctcattagagtagaatgtaaagatttttctttccttattatggttcagctcacttatacctattaaataactggtgagaatgttttgacttcatctttacccttaaatttaacatttaaatataaatatcagttgcactttaaaaattcacatatccactaagcattcagtttagaaagtgttgtgtacatcatgagaaatagaactgtatgatgtaagatttgtgctttatttagcatgggtgataaatgtatttatattacagcgtacatgtttgcttttgaccatttttgttttgtccaaattttcacaataaggcccaaaatattcacttgtatgttctcttcaatcctctatctcaattctactttgcatccaagtatctgggatgaaaagaaaattagtcgaaagttttaggactttaagtgagtagatttttattactgccctgaaaaaaaaaattaaaaaggaaatgtcatgaaaacaatgggttctagaaaaaaaaagctgatatttctaatacagtaagaaaatagatgtaattgtcaactccgaaggaggtcatttcactagcacatcctatggagtggctgagctgttagcagcagaaggctatcctaatgacaaacatacaaccaaaagccccagacaagcaaactgttgcacacagggctgtgtgtgtgtgtgtgtgtgtgtgtgtgtgtgtgtgtgtgtttgtgtatgcttgcatatatgtttcaactgaaatccacttgtgtttgagcctttgataatattcggactggacttcgtgttactaaaatctagatttcaaagtgtgctttcagaaacagggaaccctgagatgttccctggctagacgctcttttgatggattcatgattgctgagctagcctttcaaagggccacaataactttaattccaggaaatagcatcaggtcaacaaattacttgcttgtggtctgtttgttttctcaggtctggattttctttgatcttgggtaagctcaaactaatttggaataaaatgaaaacagttctctgcttccccacctttaatcagtaatacccctgactgttttaattagaagcaaaagaacagttctctgtcaactcaaggcaaaggacacacagtcctgccgtggcagagggagttggatcccagggtggaaagcaaggcaatatgaaataacgtttggccctattttcttagggaaaaagagtaaggttttgcttcactctagtttaagttacagcacaccctttcctctttattttttgttacttctcttctaccgtccaataattcttccaaccctgcctctgttcccaattggtactgtaaggtactggcattttccacaggagattcttgactataatccttcaatcaacttgctgagttaagcatacgctttcatcaaaaactgtataaaacctgtgtggcaaagactgataccttttgttctttggttggaatcaaagtgtatactttaaaccatcttttatggaaccagaacttttatttctccttatcattctcttcagtaggactgctataaattagacatagcagctcttgtttttattaaacagcacattactgagacaatttattcaaaatgcaagatttcataagctgtaccagtagcttcaaaagggtgaatacaggttttagaatttggtacccttacacaacacaaatctataatgttttcatgtaactatatagaagtgcatttttgttaatatcatttcctctttttggttagtgtttcttcttcacttccttatgaattatgcataagtgagaaaacaagacttttttcatgtacaatgatcctattttcctgaacagaaccctggctgaacggtattaaaattcaggttccaaaatgagccagtggtaaagaagaaatagagtggaaatttaacacatccatttattatacactgcaaaatgcaacagggacagatgccccatgatatttctcctcagctgtgatcactttctctacaatgttgaactagtggctcttgctctagggactatctggacaattacctgcagcttggagtcattacggagatgatcgtcaaggaactggctcatttgggttacactcactgctctgttcctaacttcctgtgtaaacaactctggagcttaaacttttcttatctatattataaaaatatgcaaataatttctaatatttagaaaagttatataattttaattctaaatgtaactgacagatggcggaatttctcccttttttggcaacactgtttttaaagtttagaatagagattttggtcatctcaatcactgcctctctctagccctggtatcagcatgtttaagtcatccgaacactgtacacaccatgaaattctacaagaagatattatgtaaatgagccaaatttacaactttggatagagaaactgattttaaaaatatagttaataatccataaatgatgaagaggtatgttttctgctagcttatagttatggtggtggagtgaggggcagttgtgttctcctctttgtatttcctctggacggtaatgtacttattctctaatgcagcaccttttaataaacgtttagtttctaagctcttgtgattttgttagtctcagcattttcttatttttcagcagaactggctgtgaattagaatcttttctataaagttgctataaaattgccaccaacaaccaaaactcagccagctgacacaccaccaaaagtggtgtgattattacaaagtgcccccacatatttttgtgtgaccctacatgaacaacaacaaaatttgggatgctctcctttcaattttaagcagaggaattagttcaactaagcaaatggtcaaggataataagattcctgagagagtagagaaaaaacagggacaattgtatttatcttttgtaaaatcaagtttataagaatatgtctcagggccacagttaataaaatatctattttgttttcttgagaaccacaatgaaggtattagtgtaaaaggtcatccatagatgccctacggagttaacagcacaattgagctcttgctgcttctgttacaagagtgcttcaaacacaccattcaactgatcacatctattagacctcaccccattcttgcaacagttctcagaaaataagaggaatgtggttttcagagacttatgtctctcctggagcccccttaatggcagggttaggtgggagagcatggaggaagcctctcaagaagtgagacacatgcactttccagatgatgatgatgatgatgattattattattattatttttgacggagtctcgctctgttgcccaggctggagtgcagctggttgatctttcagctcactgcaacctccacctcctgggttcaagtgattctcccacctcagcctcctgagtagctgggactacaggcacctaccatcatgcccagctaatttttgtgtttttttggagacaggttttcaccatgttggccagactggtcttgaacttctgacctcaggttatctgcccatctcagcctcccaaagtgctggggttataggtgtgagccgccacacccagctgacacatacactttctagattgttatttatttatttgtttgtttgtttttgagacagagtcttgctctgtcaaccaggctggagtgcagtggcacaatcttggctcactgcaacctctgccgcccgggttcaagtaattctcccacctcagctactttctaggtcttgtaggacaggaagttgccacatggtgagaaggaaaaaggtcagattatgagcaggaactgagtaatttttacctatgaccctgggactcatttaaactctaatcaaacagagaaaagtacagtaaccaaaattattcttaagacagattatgcatgtatatatcattgattttattgcctaattcagcagaggaattactaatgatattttgctaattctacaggaagatagtgtggaaacataagctaaccaatgcctcatttctgatgtttcttacctagtatggtgattagcgtcagtgtttttaaatcattctctaaaaagcacatccctgcctgattttctttccatgtgttctgttgattactgagaaagaaatgtcaaagtcttcaactgtaatagtggatctatgtgtttgttttatttatttatttttaaatgttttatttccataggctttggggaacaggtggtattttggttacatgagtaagttctttcgtggtgatttgtgagattttggtgcacccaacatccaagcagtatacactgaatgcaatttgtagtcttttatccctcactcccctcccaccctttcccctagtccccaaagtccctcctatcattcttatgcctttgcatcctcatagcttagctcccacttatgagtgagaatgtacgatgtttggtttttccattcctgagttacttctctcagaataacaatctccagttccatccaacttgctgcaaatgccattcattcattcctttttatgactgagtttgttttaattttcctttcagtttattcagttttggctttatgtatttggtttgtttgtgtttgttattgtagtaaaatacacataatataaaatttatcattctaactattttaagtgtaacattcaatagtattaaatacatccagaatgtcatgcacccatcaccaccataacacttttttgtcttgtaaaactgaactccccattcctccctctctccagctcctggcaccaaccattctatttcttatctctatgatttttgactattctaattacctcatgtaagtagactcataccatatttgcctttttacgactggcttatttcacttagcataatgtccttaaggttcatccatgttgtagcatttatcataattttctttccttttaaggctaaataatattctattgtatgtatataccacactttgcttatccatttatctgttgatggaaacgggtttcttccacattttgctatcatgagtaatgctgaaataaatttggtaaatatctcttcaagaccctgattttagttattttggatatatacccagaaacgtaaatgctgtattatatggtaactgtatttttaattttttgaggcaccaccatactttcttccagctgtacaatcttatactcctatcaatactacacaagggttctaatttctccacatgcttgctaacatttgttattttctgttttttgttttttaataggagtcatcctaatgggtattgagtgctattttcttgttttgatttgaagttctctgatgattaatgaacacagaatagaatagagagctcataagcaaatcctcacatgtatggtcaaatgttttttgacaagggtgctgtgattattaaatgagaaaagaacaatcttttcaataaatgatactgaaaactatatccacaagcaaaataaagaaattggacctttacctaactccatatacaaaaattaacccaaaatgggttaaagacctaaatataagacttaaaattataaaactcttagaagggaacacagggcaaaagcttcccaacgttagatttggcagtaacttctgggatataaccaaaggcacaggcaacacaacaaaaaatacaaagaaaaattgggcatcataattttttttttttttttttgtgacagagtcttgtcgtccaggctggagtacagtggcatgatctcggctcactgcaacctccgcctcccaggttcaagagattctcctgcctcagcctcctgacctcctgagtagctgtgattacaggcatgcaccaccatgcgtggctaatttttgtatttttagtagagatagggtttcaccatgttgaccaggataagtctcgatctcttgacatcatgatccgcctgcctcagcctcccaaagtgctgggattacaagtgtgagccactgctcctagtcttttttttttttttgagacagcgtcttgccctgtcacccaggctggagtgcagtggtacaaccttggctcactgcaacctccgccgcctggattccagtgattctcatccctcagcctcccaagtagctgggattacaggcatgtgacaccatgcccagctaattttcatatttttagtagaaacagggggtctcactatgttagccaggctggtctcaaactcctgatctcaagtaatccacccgcctcagcctcttgaagtgttgggattacaagcatgagccactgcactcagccaccataaaaatttttttaaaattatttatcaaaatcacagacaaaaggcaatccacagaataggagaaaatatttgcgaatgaaatatctgataagagattaataaccaaaatacacacagacctcctaaaactcaacaacaacaaaaacaaacaagtctatttaaaaatgggcaagagaataaatatacatttctccaaagaatatacaactggctttagtattggcttcaaaatagtattttgaagctctactattagatacatatacaattagggtttttatctcttcttggcaacttgaccctttgatttttatgtaatatctctcattgttccttttaaatttctctgctctgaaatatgctttgataatcatttagtcacttcagctttctcttcattagtgtttccatggtatccttttccctatccttttatttttaacttatttatatcattacataaagtaacattttatggaaaggatatatttgatttttttatttggtccattctgataatgtctgcatttttttttttttttttttgagacggagtctcgctctgtcacccaggctggagtgcagtggcacaatctcggctcactgcaagatacacctcccgggttcacgccattctcctgcctcagcctcccgagtagctgggactacaggtgcccaccaccatgcccgggtaattttttgtatttttagcacagagagtttcactgtgttagccaggatggtctcgatctcctgacctcgtgatccgcctgcctctgcctcccaaagtgctgggattacaggcgtgagccaccgcgcccggccgacaatgtctgtattttacttggtttgtgtagccatttacatttaatgtaaatattgggattttgaattatgcctaccactctatcatgtatgtttactttttcttccctttgctttatttttctgtttccccttccctgccttcttttgttatttgaacattttcagtttaaccaagtttgagttttgctgctgctacttcttttatttactgcaggcttcgtattgttttacaggaccgttgccttgtgctcaaaggggtggctgaagtgccagagatttttggttttctgctctttgtttttttgttttttttcttagtgtttgtgatataccttcaactttcataatctctgcaaactgcactgcagcaggggtctcactccatagtactgtcctcctcccatactggtagcctgctcttaccttttggattctgggctagtggtggtgtctggcaaggattcactcttgtccacgttcagcctcagcttagacagaccttgtgtgccaggcctcctggggaggagggaactatctcagcattcttactccttcacctcatgtcagccagctatgtccttgttctgtggttggttcttacaaggtattctctgatcctaccccatgatagcagacctcgaattggtgatagataatagattctgggcccaggatagtttttacaggaatttttcttctgctttttccacagtgaaaatgggtctttgtcagtgtccttaaagtgtgggttgttgtccctcctccaagtgctgtaggtctttgattcataggagaaaagactaaatataattgtaggaatttgtatctcccaggccccagtagctacagatcattttctacagtcttgcgtcagcaagaacagctctttttggtctgttctgttccagactatctcataaattactgcaggaggtacttttaaaagagcttgcaagagagtatctgggccctcaattatttcagccgtacctgaaagctagctcacccttggcatttaataattttataaaatttcagctgatttttaaattttctttcatggaagctgttgagtagccccttatttccctaattctttgactcagataagactattcttctgttttatctcttattatagaggtatgttcctctttggaatttaagtaatttggttggactgcaacctcaggtatctaatgtgctcaaaaaagttataattttatgggtttttttttttttgtctttatctcattgttagaatgggaacaatgttcttttcagctttctacatcttagccagaaacagaaatctctttcctttggtatggctccacctatatgatatcaagataatttaatagtatgtagccacagtgcactaggaaaattaattggcttttaccagctttctgctgataatgccttaacttgaagaagttaaataattttggaaaagtcagatattgggaacaatcaaatttcgaatatacacatccaatataatcagataagtagtaaatagttaacaacaacaattaacgtcagaaaatagatccaagctctcatacatttgtctatcaagataaaagcttcaggggaatagacagcttttatcataataaaccataaaggtaaatccctcctccctcacacaacacacattcttttttttttttttttttttgtattgtgagatttttattagaaacgtttttctgcctggcgctgtggctcacgcctgtaatcccagcactttgggaggctgaggcaggcagatcatgacgtcaggagatcgagaccatcctggctaacacggtgaaatcccgtctctactaaaaatacaaaaaattagccggctgtggtggcggacgcccgtagccccagctactctggaggctgagggaggagaatggcgtgaacccgggaggtggagtttgcagtgagccgagatcacgccagtgcactccagcctgcgcgacagagcgagactccgtctcaaaaaaaaaaaaaaagaaacgtttttcttcatgtaccattgaatttcttcaagttttacagtactctctgaaactttaccatgagcttctgtgcgggggtctttcccgcagaccctgacccaatgatagatgaataacgtacactgaaacagatattctgcttgtcagtctagctaaggatctgcgcccctcacagacaccaaggaaggtgctgtaaagagttggcagccacagccttgactagctggcctggctggcatttattcagcacacattaaatgacaaaggctttgagtcaacacacctgtgggtaattaacctggtcacacccactctggagagggccatcttgcctgccaatgattaaaggttagtcttaggaccacatgagtaaacaagctatttagataaactattctacattcttttgtatccgcaccctaagctctctggctcctgaaaacagactctggctgccttcagccaaactacctgacgctatgcaaaacttcctggctttccaagaaggtttgcttttttctattcctatcatttcttctgccatcctgactgaacccctaacacttctattacaactacttttaaggtaatatataacaatcaaactagaatccaaacaactataatcttaaactaatgtacaaagagaggggacatttacaatctttttcatggatagccaatcaataaatcatctcaactcgtgtcaatagaggcttagttcaactttccacacctcatagatactcgaaacataatatcatcaagttgcaaatgttcatatagagggttgtttatgctcactggactatgtttaggcaagaaaaaatgtcttgagaaattttataaaccatttaagcaatgtgtacaggaataaaatgacattatccactaatgtttagtttaacataaaattagattaactagaacatcctattcccaaagaaatgcagtcagtaatggatttataataacaagaattagaaatatttatgaaaatttcttctgagaacgtcactgaattttcatctgtgtaacttaagttattcctccaagatccctatgaagtaggaaaatgttttatcttcaccacatgacaaagtacacgagtagttaagtatcttaccacaggatattttggtagaaaacaacataattctatttgttcagacatttacatttgaattaatttacaaatgcatgtaataaaccatctaagtcatttttataactctttaaaaatcccaagagcatacagtgcatttatactgctggagattagctaacagttaaagataagaaacaatcaataaaataatcattgtacaggaaatactatcgtgtaattgtgcacacttatcagggattaactctctccttaatctttaataaacttcatcttagaaaatacctagcccgcatctttcttctttcaactgtatccttaactttattttcagataaagtgccttatgaacaaacatttgattgtccattaaaactgtcctgctcttttaaaatccagttgaaattcttttctgagtaccaaactgatatctttgccggtttttattttgttttgtttttaaatggaacagaacacaatatcttttggacagctacaatgcttattcaaaagtagtgttgagatgagaagtaatcctttttaatgttttaccaaagaactgctttaatgttatgcggtgctaataactgctttaatcctttagatttcttttagccaaaaacagagtgatgagttcctctatacttagtctgtaactttgtttaatattctttcaataaacttttaagaaataatcttaattttgaatgtgttggttgttttctaactcaagtacattgaataagttacgaacaaataccagcccttcagctaaataatagacatctttctggaaagtgacactgttcccttcctctaaagataaagcaaaataatgcattgaatgttacaccaaataccttactagagagttttacagagatatttcctgatgtcatagggagggcttcagcttctataataaagaagaatttggttaaaattctaagtttacttagtcaaatgtgtgacctggatccgtgagtctctttcctcatctataggatagggattataatgtatcattttaaaggtagttgtcaagagccaatgttttaaatatttaaatagccctatagagaacgtggagcttcatgaaagagaaaatatttctttctttgttttctatgcctatagcctactcagacattgagtttatgtatattttgtacttactattgaatcacacactggctcattgcaatatcattatatctgaaagaagagacactaggggatagtggtagagagaaaaaaaggaattttttttttttttttttgagacggagtgttactctgtcccccaggctggagtgcactggcaagatctcagctcactgcaagctctgcctcccaggttcacaccattctcctgcctcagcctcccgagtagctgggactacaggcgtccgccaccacgcctggctaattttttgtatttttagtagatacaggatttcaccatgttagccaggatggtctccatgtcctgacctcgtgatccgcccaccttggcctcccaaagtgctgggattacaggcatgagccaccatgcccagccaaaaggaatttttaatgttcaataaaataaaataaaaaatactctgtttccaagccctgttttctaatagatcacacctacacttttagaaatagatttctagcctcccaaccattgcaatagatgcagaagtttctacaaaatatttagacaattattttaatctttgctgaaacatttctagtgataggcgtagaacctccaattttatttatatatttaaataatttagtcaatgtctaaatctctataattgcccagtttaagtcttatggaccttcataaacaaattctaactctcctttgttgtgagaatcttttaaggaccgtgttcatgatctatagtgaatatgttgttcttctctgtccacattcccttcttgagctgtttttccttccttcactccttgcagccttggtgagactctcttggtggcctgtgattggagtgaccagaagttaacactctgtcccttgtatagtcatgattccaggggctggcacaagaacaaagcaaaaccattctcggccttcatggctaaataagcaatgatctcccctttttgcttaagataatctgagtggtattcagttgcttcattagcaattaatgacttgtgaatatactttgtctatatcatagtttttcttttattttccctctgtaacaacgctttgtccatcttcagtgttaagcctatttcagactctttaccatacattgttctttttttccaaatgatgcatttttttctgcttttcttaaaatgaatttccaagaaattagcaaaaatatgctaatgaccaatgcagagactatgcaccagcaccctccttgttctgattgctgtttttctaataatgaagcctaagttggcatagctttgctggcaccccatcacctaatttcctggcattgagtttgtgaacaagtaaactcctggggcatcctagttgaccaccagacaaaagaatgagggtgaaggtagggtgttaaagccctagggtgccttcctatgaggtttcctgcaggcattggccactgctcttcgcaaagcagctaattctctgcatccccttctccctcctggttctggcaacttctctctctactcctgactttgaatttaggtttggtaacagtttcactgatgctagcccatattctttcaaggttcctctatacttagtctatatttttgtttaatatattttttccacaaactttaaaaaaaaatcttattttgagtgtgttgttttctaactcaagcacattgaataagttaagaacaaacaccagaaccttagctgaataatattgtagacacctctatgcagagtgacactgatcccctcctctaaagataaagcaaaatatcattttattaaaattaatagaaataaaatggtacttgttatataataaaatagtattaaaatattaaaatgttttgctaatataacaaaatagtatttaataaatattattgaatataatattttctataatataaagctagattataatataaatacaatgtaacatttgctatgaataaatattcccatggttggcatttcagcagtgaggtacagttgcattaataggtacatgtcctttccctaatatctaacaatataaaattaagagtagttggagatgaaaaaataggacataattttatgagcatggaaataataaagactgtgtttgctcacaataaatgcaataccgctaccccatcctctcagtgattcacattaaacactgaatatttgccttataacaggagggaagaaaagatcaaagactattaaacaaggctgagagttacggcccaaggatttagttgcggcataacttcttgaaaaccacttctctattcaaaggggaagtgcttgagatagttttgttagaaggtcattgtcttcttttagaaggcgtatgattttgtatgtgtattcatgtgtatgcccacatgacacaaaaactttttagatatgccacagaatagtgagaataaaagtggggaggaagagctctatttgtagaccccttaaatacaagctataaacaatgcatttgacattttgtgcaatcactctgaattctaattttaaaattaaaattaaatttaaaattaaatctaaaatgaaaataaaattaaaattaaaataactattttaattttaaaaatattttttgaagatatttttatttatgtgaataagcattttttacagagttaagagttacagtcaatggtgtacatgtttttaaatctctgaacatatattgtcaaattgctctaataaaattatataaatttatatttcaaacaatcatataaaaagtgctggtctcacactgtgatgagtcgcattgcggaatcaatctttaattgcaaacttttttcctgcaacagtcaaaattcttgggtgatgggcagacaactggaaggcgggtaccctgttttgtataggaacatcctttgtttataatgtctgctctgtttacttaatccagacctcaccattttactttgatcccacataaaactcaagaagcaatattaagaactaacactgggctaggtgcagcgctttgggaggctaacgtgggaggattgcttgcgcccaagagttcaagaccagcctgggcaacatagcaagactctatccctacaaaaaataaaaaaactagccaggcctgtaatctcagctactagggatgctgaggcaggaggatgggttcagcccaggcgttcaaggttacggtgaggtataatcacacgaataaactctagcccaggcaccagagtgagactatctcttaaagaaaaaaaaaaatgattagcctcaaaggaacccctagtatgtcaggaagatgagacagtatctaatataaattattttttacaaggtagaggaaagtaattcatattcagaaagaggttgttgaggtgacattggagatgtttgtacattttgagtgagtcagttctagctgggggcccatttgtctcaggatcacttgtgactgagaaagaagagaattttgcctctaggacattattttaaatttattcaaaattacatgcaaaaatagtcacccacagatggttactccgtagcttgcccaaattgaacagatcgttccagaactgttctcagaggtggataaatgcccactttacaaatccccagttgtcagtcttcagagactagagagaaatggaatgcagctgagagaatctaaactcttcctcaacccttggaggaggtctcttcccagggcaggattcaagtgcatctgctttgctgcaaggcaagttccctattgaacgagagctcaacccagaagatttcaaaaaccatgcctggggacttttaagaccacattttacaaacactttaaaatgtggttttgatgctgttaacctttaaccatgcttttttttttttttttttgaaaaagctctctgtttagaatcttgcaactctctcagacgaactacagatcatcatttccataactacaccaacttacagcgaacttctttctggtgtttattatctgtattgccattcattgcctcttattgctttgttgttgatgttgttgttgtttttataagcaagccttgaactctaggaagattgtaagcatcttggggttaggggatagatattttatctcagtctatttgctttaaacaaagtaagttctaacattgcgtattgagtactgtacttgttaacaattctcagcatgtgaaacatatcatttgtgcagcttggaaaagtaacttatatgattatacagaatgtttgtgatttggtcagggagtattatttcctctcattaattgccgtgtgcagaagacttaaagtggaaatagttttcactggagaaaaagaaaaaggaaaaccatgttgattcttactgccagtcaccacagactgtaagccttagtgcttccaggcaaaacgaataagtcaaaagtaaaagttagacctttaaaactttgttgaaacttttaaagaaagaatatttattggagagaaccaattaagtgagtgttgggggggaaattgctcaagtttatgacaatagaaccatctttggattatttatcatcacttctataaactgtctttaagtatatactgaccatatactttgctcaggatggtcctggtttgtgctcgatgtcctaagaaattatcaatagctcctccccaacccttccacacacagcatgtcacaaaggggatactaaattttatgactgctacgcagattgaatgtcttagtcaagatctctactttcaaagaatgaaaaaccacgcaaatcaatcaataaaaagtggtttttcagattagataattgtatactttgctagttttgaaccactcatcagatattggactgttttaatatgctgccagcattatcaaataataaaggtaaaaaataggtatttctggtcagattctggactagcttactatgtgcaaactttcaaaatagattttagtatttctgatatttgcgctttgttcatgcaaagtaaattagaatctggtgtatttaaaagaatgcaccagaacattttaaaagaatgtttattttcttcaattaaaaacaattctttagagagaacatttagatctgattctagctattcaaactaaggagaaataaatgacttcaacacagaatgactgactaggtatttgcagggtgatttgaagtcccaagggataatgaacttctgtgtatttcataagagtgttattaacaagcaagtggctttttgggtcaagagcttggttcctaaaagtaatgtcaaacccatcacatattctcagaagcatgtgcatttaggttcaatctcattatgcaagcttatgtcaatcaatttccagttcccagtttccaaggatgttagaagagaaattagttctttacctgaaaattctatttgaagtgggaattagtctttgaaataaacaaaaccatcacaaataccagcatgctccggaagaattcattcctttaaagagcaatatgttccctctgcttcactgaagaaaaggagtttgatgggtaattcctaaattatgttttaaaatgtttatcataaagtcttagaataatagaagtgcacctgcaaaaataagcatatattttgggtcttggttgtggttgtggcatatgcctgtaaatgagcagaagtaattccaactgcttttgctgttattgccattattgtttgttggtgatacttttatggctctggcagcctggagacagaatttcttagatagataaaagatgaaggggaagaatgggaagtgaggaaatgaaaaggggaagaatagtgcgtggtatgaattatgagaaatcaaaatataatgccatgtgacaaaatgtcaatcatttctatttacctccactattaaagttattaaattaatctttagaactatagacctggaagtttatttgagatgatccctggaatttatcactactattagtaatacccaattcagttcttaggttcccttcattgatattaacttacttattggatgaaacttcattatcgttctttcttatgcattctaggtacccaatactttaactgaaaagcaaaattttaaaaatagtcttgaaaattatttttaagtttagaaagaacctgctataaacagaaaaggtgaggttggaggagagaaactcatgagaaaccaaatagccaaagtaatgagtagcccttttttgagaacttattaaactaatcaatggtaagaaaatatctctaaaataattgggaaaactagactagtcactatttttttttaaatttttattttgatcttaggaacagcatgaaaattatgtaaattcctgttttcttcgtgatgataccaaattatgtattaacaaaattgaatgatgtctggaatgtgttttaaagcattctaaaaaaaagtagtattacgaaacaagatttcaaaatattgattattgttgaagatgaattatgggatttccataaactaaaaaaaccaacattgtatttcatgtaagttaataagctgaacctaaaatgtgcatgattgatcaaaaccctggaattagacaaggcactcctgaagaagaaagacatgagaggacctatcttatcatatttcaggacttattacaaaacagtattaattcatgcatataacaattaattattgaatatctgttatttgctaggcatacttattgatgtttaaaatacagcagtgacagtatagtattggtgccgagatagacaagtagataaggtgaatagaatatagaagccaatgatggatccctgcatatatttatacttaatatatgacttgcctgggaagaaagactcaacaaatgctgcaggaacgattaatcattcacaataaaataaataaaatttgatctctgcataacttgcctacacacacacacacacacacacacacacacacacacgcaaaatcctcagaacacacagattagattcccggcagattatagacataaaagataaaaactaacgtcttacaagaaaacataagcaatgtatttgatctgaatgtaaagaaaaatgtcttaaacaaggtgcagtaagtgcaaagcataaaaaagtttataaatttgacattaaaattaaaaacttctgtgtatcaaagcatcctgaagaaaaagtaaacacacacacagaatcaagaaagaatatgttttcaaaatctgtaactaactcctacaaatcaataacaaataagctatgcaacccccaaaatgagcaaaaataaggagaaatcagcagcgtgctgaagaggaagcataaaatgtgaaaaattgtaggataagttgatcaacgtcttatgctgctggtgaggatataatatggcataaccattttgaagacgcacttttgcattatcttgtaaatttgaaaatatacatcatctatgacctagcaagtacactattaaataaatgtcctggcaaaacttctgctcacagcgtaacatgagtattgattcttctattcttctaacagcatcattgggtcactcagtagtgtttcactggtgactggtttcatctgaaattttttataaagtttattttaggttcaggggtacatgtgcagggttgttatatagaaaaaactcgtgtcactgggttttttgtacagattatttcatcatgtaaacttagtactcaattgttactttttctgatcctctccctctttccaccctccacccccaagtaggctctagtgtctgttgttcccttcttgtgttttcatcatttagctcccatttataagtgaggatatgctatatttggttttctgttcctatgttagttttctaaggataatggcctccagctccatccatgttcatacaaaggacatgacctcattctttttttatggatgcatagtattctatggtgcatatgtgcttatgtgtaccacattttctttattcagtctaccattgatgggcacttatattgattccatgtctttgctgtagtgaatagtgctgcaatgaacatacatgcccatgtgtcttaatggtagaattatttacatttcttggtatatacccagtaatgggattcctgagtctaatggtagttctggttttagctctttgaagaatcatcatactgctttctgcaatgattgaactaatttacactcccaccaacagtatataagtgttcccttttctctgcaacctctccagcccctactatttttttactttttgataatagccattctgactggtatgagataacatctcattgtggtttttatttgcatttttctgatgacaaatgatttcagctttttttttcatatgcttgttggcttcatgtatatcttcttttgaaaagtgtctgttcacatcatttgcccacttttaaatggggctgtttgtttcttccttataaatttatttactttccttaaacaaattaaaaaaattaaaaagctggatattagaccattgtcagatgcatagtttgcaaatattttatcccattctgtaagttgtctgtttactcattgataacttcttttgctgtgtagaaactctttaatttaattagattctatttgtcaagttttgtttctgttgcagttgtttttggcatcttcgttgtgaaattttagccaattcctgtgtccagaatggtatttcctaggttgtcttccaaggtttttatagttttgagaactacatttaagtgttcattccatcttgagttgatttttgtatattggacaagtaaggggtccagtattaatcttctacatatggttagccagttaccttagtgttgcagaaagttcagggaccccaaacggagggaccggctggagccgtggcagagaaatatgaattgtgaaaatttcatggacatttatcagtacccaaataacacttttataattttttatgcctgttctttactttaatctcttaatcctgttatcttcgtaagctgaggatatatgtcacctcaggaccactgtgataattgtgttaactgtacacattgattgtaaaacatatgtgtttgaacaataagaaatcagtgcaccttgaaaaagaacagtataacagcaatatttagggaacaagggaaaacaaccataaggtctgactgcctgtgggatcgggcaaaaagagccatatttttcttcttgcagagagcctataaacagacatgctagtaggagagatattgctaaattcttttcctagcaaggaatattaatattaataccctgggaaaggaatgcattcctggggggaggtctataaacgaccactctgagagtgtctgtcttatacagttgagataaagactgagatacgccctggtctcctgcagtaccctcaggcttattagggtggggaagaaactctgccctggtaaatttgtggtcagaacggttctctgttcttgaaccctgttttctgttgtttaagatgtttatcaagacaatacgtgcacagctgaacatagacctttatcagttgttctgctttgtctttgtcctgttccctcagaagcatgtgatctttgctctgctttttgccctttgaagcatgtgatctttgtacctactccctgttttacaccccttccccttttgaaacccttaataaaaaactttctggtttgagcctcaggtgagcatcatggtcctaccgacatgtgatgtcacccccagcggcccagctgtaaaattcctctctttgtactctttctctttatttctcagccagctgacacttatggaaaatagaaagaacctacattgaaatattggggttgggttcccccgataccctagtaccgtttattaaatacgaagttcattccccactgctcatttttgtcaacttttttgaaaatcagatacgtagttataggtgtatggcttatttctgggctctctagtctgttccattgatctatgtgtctgcttttgtaccatgaggtccatgttgtaccaacaggtccacgttgtaccaacaggaccaagctgttttagttactacagccctgtagtatagtttgaagtcgaggaacgtgatgcctcctgctttgttgattttgtttaggattgccttggatattcaagttcttttctggttccatataaattttaaaatagtttttttctagttctgtaaataatatcattggtagttggataggaatagtattgattttgtaaattgctttggacagtatgaccattttaaccatattaatttcttcctatccatgagcatgaaatgtttttccatttgtttgtttcatctctgattttttaagcaatgtctggtaattctcattgtactgatctttcaactccctggttagctgttcctaagaactttattatttttgtgagtattgtgaattgaattgtatttttgactttgccctcagcttggctgtttttggtgtataggaatgctagtaattttttttttttttttttttttttttttttttttttgagacaagatcttgctctgtttcccaggctggagtacagtggcaagatcgtggctcactacagcctctgcctcccaagttcaagcaatcctcccatctcagctaacccagtaggtggtaacacaggtgcatgccaccacatccacctaattttttatgttttgtagagacaaggtatcaccatgtttttcagggtggtcttgggctcctgggttcaagcaatccacccacctcagcctcccaaagtgctgggattacaggcatgagacactacacctggctggaatgctagtgatttttgtacattgatgtatcctgaaactttgctgaagttgtttatcagctgaaggagcttttgggctgtgactatggggttttctagatatagaatcatatcgtctgcaaatagggatagtttgacttcctttcttcctatttgggtgtcgtttatttctttctcttgcctgattacgctggcctggacttccaatacttcgatgaataggagtgatggagagggtatttttgtcttgtgccggttttccagagaaatgtttcaagctttcgcccattcagtaagatgtcggctatggatttgtcatagatggatcttactattttaagtctgttccttcaatagctagtttcttgagagtttttaacatgaatgaatgttgagttttatcagaagctttctctgcatctattgagataatcatgtagtttttgtatttagttctgtttatgtgatgaatcacatttatttttgtttttatttatttatatgttttgagacagagtcttgctctgtcaccattctggagtacagtggcgcaatctcagctcactgcaacctccacctcccaggttcaagcaattctgctgcctcagcctcccaagtagcttggacttcaggcacgcaccaacacacccggctaattttttgtattttagtagagatggggtttcaccatgttggacaagatggtctctatctcctgaccttgtgatctgcccacctcagcctcccaaagtgttgggattacaggcgtgagccaccgcactctgccaaatcacgtttattaatttgcatatgttaaaccacctttgcatctcagggataaagctaacttgatcatgatggactaactttttgttgtgctgctggatgtgtttcgctagtgtttttttgttgaagattttttcatcaatgtccatcaaagatattggcctgaagttttcttttactgttgtgtttctgtcagactttaatatcaggatgatgctggcctcaaagaataagttggggaggagtccttccttctcatttttttcaaatagtttcagtagaaacgttaccagctcttctttgtacagctggtagaatttgtctatgaatctgtctggtcctgggcttttatttggttggtaagctatttattactgattcagttttagagatcattgcaggtgtgttcaggaatttagtttctttctggttcagtcttgggagggtgtatgtgtcctttatcaggactttttgttaagacttcactcacatgcctggtctcttaatggggcagttgaaggctggcctctgatgaatgggcttctgtctctctaaatgtagtcttacagcctttccataaagtcccttagcagagaagtcagactaccctttgagtgtatagagactacattgcagcttaggtcttctatatatcaaagcagaaactgcaaatcctctttgaagctagatctgaaactggcataacttcattttctctacattcagctgatgaaaggcatcacaggtcagtctagttcaagaagaggaaatagttcaaatcttgtactggaagattatgaaggaatttacagatttttttttttttttttgagacagagtctcgctctatcatccaggctggagtgcagtggtgcaatctcagctcattgcaagctccgcctcccaggttcatgccattctcctgcctcagcctcccaagtagctgggactacaggtgcctgccaccacgcccggccaattgtttgtatttttagtagagacagggtttcaccatgttagtcaggatggtctcgatctcctgacctcatgatccacctgccttggcctcccaaagtgctgggattacaggtgtgagccaccacgcccagccagaatttacagatatttttaagccacagaatgttcatgacagtcttgctcataacaataacatgagaacaacttaaatgtccatctgtgaaaaaaatctcatagctcacaaaatgaaacactacataacagtgaaaatccactgaaggcattatatgttgtcaaacagatgaatcttaggaacaattttgttgttgtttttaacgtaaaaagtttttttcaatacaacacattcttattaactatagtcaccatgttgtacaatagatctcttgaatgaattcctcatatgtaactgaaattttgtatcctttgactaatatctccccaaccccttttccacaagcccctgatagccgtcattctagtctctacttttatgagttcaactttttaaaatttgacgcgtaaataagactatgcagtatttgtctttctttctttggcttatttcacttagcctgatgtagtccggtttcatctatattgttgcaaatgtaagatttccctttccttttatgggaaaatagtattcccttgtgtatatacaccacaatttctttatccattcatctgttgatggacacttacttagattggtttcttatcttggctgttgtgaataatgctgcaatgaacaatgacgtgaagatctctttctgatatgttgatttcacttcctttagatatacacttagtaagtaaatagctgcaacatatagtaattctatttttaattttttgaggatcctctatattgcttttcatagtgggtgcactaatttacattcctaccaacaatgtgcaaagactaccttttctccacagctgcacctattgttatcattcatcttgataatagccattttagcaggtgcaatttctcatcaggaattttttcctaatatctcagacttggaaatttgcatttatctgatgattagtgatgttgcacacttacttacatacctgttaaccatttgtatatctccttttgagtgaagtctgtccagatattttacccatttatttattttatttatttatttatttattcattcattttgagatggagtttcactcttgttacccaggctggagtgcaatagcgtgatttcggctcagtgcaacctcctccttccaggttcaagcgattctctttcctcaacctcccaagtagctgggattgtaggcatgtgccaccatgcccagctaattttgtatttttagtagagacggggttttgtcatgttgaccaggatggttttgaactcccgacctcaggtgatccacccacctcggcctcccaaagtgctgggattacaggggtgagctactgtgcgcggccttttgcccatttttaattgtttgtttactattgagttgcttgagtcccttatgtattttggatagtggctccttatcagataggtggtttgcaaatattttctgccattccataggttttctcttcactctgctgattgtttctttggctgtgcaatagctttctatttgatgtgatcctatttgtctatttttgctttcgttgcttaggaatgttataagtccttcaattaatcttcaagttttagaccctttaaaaaaaaacattctttttgagccgttaaaatatgctttgcagaagactggtaccagctgcttggaaatttcctcctatattccttcagtcttcagtcatttctgctcagcttcatttatgctcatggtctcatcatccacctccagaatgtttttaaaatccttcatacattgatggtatttcttatttctcttctcatctgcattttatttcacagggctctgtgatgattgtgtgtgtatagctaattgtcctgtgcaataggttttatgtatgcattttctgaattacaaccatgagaatactggagccaagataatgggatccaaaattgacaaatctcaattcacatcgttttgcactccttaaaaggaaaggacttaataaatgttagtaacctgtacacaatatttatacacaatttgctagttttgaattatagagaatggcagtcaaaaaaggggaacataatctgttcgttattttggtttcttcaaatatatgttaaaaattttaaatgaacattctaatgataaaatattttaattttagaagagtgttatcttgggacttttaggccctgtaatgtctcttggaattcaaaagcttttgcataataatgttttgatgagtttaagtgtaaatgtaaataaaaaaataataaggattaaattttctttgacacatatgtgaaaattttgagaaaaaacatgtctggcacatatgttctggagtcagtaaaacaggaactatgagcaaattgtcccaaagtagttcacaaaacacaaaatccacaagaaaagggtatccaattcaccccgcaaaacagaggacaaacgtgtattactaaattaacagaggtagatccatatattttatttgtttccttgggaatatagaatgtcttaaaagttgaatctcaataaatcagttttatgcagtgttctgatatgttatactcattttgcttctaaaaccttctagaatcctgtataagactagttaaccaattgggaacaacgttagcaaatatttccacacacacacacacacacacacacacgcacagatggccagagttttgcttaaacatctttctattgcagtcagaactattccttcatagagaaactaatgtgtatatttttaataacaggtttatattattgaaatgactgtcacacatgctgacccagaggctgtgaggacaatagcagtcctacagttgtacagaatttaaaaaggaatgaaatattttatatcaaatatgaacttggttgtacttgttgcaatagatggacttaatttaaagccaaaagcatatttcaattcccttatttcctaacacaaagtaaaagaggcagatggatactgtcatataagaacaagtttgaccaaaatggtcttaactggaaggttaatgataataaattaaattaaatgtaaacaaccaaatgaaactgaatgttctgccagaagcagcaaaaatatatctcagagtaataaaccataacatcttcaggaaagttcccagggaaacagtcttaattctctcagcaggtactacctatattaaagggtttttttctagcatgaagtttataatttgtaactgctaatgaatcagattatatttgccaggttcatccagtaaattactgttgttgttgctgttgctgttcttgttattttatgaacatagcattggagagagaagttagaaaatgggtgcttatgaccaaaacacattttaaggtcagttcacttcaagacagcaaaatggattcaaggtcttctttaaaatgaggaattgttttagtctgctttgctgttgctatagcaggatacctgagactgggtagtttaaaaagaagagaaatttatttcttagagttctaaaaaaaaaagtcgaagttccaggggctcatatctggtgagggccttcttgcgcatcatcccatggaagaaggcagaagggaaagaaaggatgtaagagtgaaaatgcacaagagggccaagcttgctttcataacaagcccactcttgcaataattaacccattcctgtgagaccaacactaatccattgatgaggtctctgccgtcatgacctaatcacttcctactagaccctactttccaaccctgttgcattaggggttaagtttctaacacatgaattatgggagagacattcaaaccatagcaggaatctctttttctaattattgctaattttcaaaagtgagggctatctaccttctctacaaacaggaattacagactttagactgaacacagtgtcacaatgtggtaatgatcaaatgctgttcatattaaaatcacttgagagaaacgttaaatatacagattcctgagcatcagtccaggttcagccagatactgaatcagaatctgctgtgttggggctcaggaatcattaatttgtagagccacatttggaagctactgccttgaaagacatagaaaggagggacttatctcttacttttcctcaggatcttttctgaatttgcagatatttgggctaggacaaacatcacatatcttcaagggagaattgtagtataaacatcaggaacaggtgcctacacaagattgtcccctcctgcctaaatttacttgatgctacttgtaatccagatgcttatgcaaagatgcttgtgggtttaggaaccatttgcagagaacaaagagaaagaactaatatatagagaatacattatgcatcagatacttattacttttatgtaccttatataagtaaaacctccatcacacatactggaatgcatcattagtattattcacattgtacaaatgaggattgcaacagagagaagaatgagacattcaaactaggccatgaggcatgcaaatggcacagctgggattcaaacttagctccaactcttccaaaaatagcaggagagtcagaatctgtttcatttcttttacctttcaatatctacaatatgaatatactggtcaaatataatgaaacttcatttattagatacagttgggggagagacaggcatatcttttctaatacattgggaaatctgaaatatgtgatcaccagaataagggatctgcatgataccacagtctccatctgatgtagtttaattttaggaaatgtatgatcgatgtgtcaatgttctgattctctcttattatgaatttatcatagtattaatagttgaatcattaaaatcctaagccttgatttagcatcttgtatttattaattgcttttagcttatttcaagaaagcaaagtgcttcatttattgaagaaaatctacaaaacagttattttttaaaattgaagattgcaaaattgttaaatatataatatagttgttgcctttatttgcttcttccataaatgtaatttttatgagatgtttcataaaaatattctggaattcaaagcaaagcactatacgtaaagttacaagcaagtggaaggcaagatgtttcaacagttttgtactcagccatttatgaccaactccaacggtcactgcaatcctgacatttcagagaaaacgaaaatgtttctgtccatactggccctttactttttctagtcatttattcagcaacatctgtttgctgctgttaattaaacattgaacaagtagctattggcttacttggaaaaagcctggaggtcaactttacacactggacttctataaattctgtgaaaagaaaaatcagatctcatttatttcaagctcaatttcatcaatcacagggtctggcatgaaactaaggctcttctaacactcggtaaataaatgagcaagtgtgctggtgggtccttctgtgaatggtattttttttctattcattctatatattccactcttcacgattcccaaacaagagacgttacttctcccttttgaatgagtcaatgcaatgagatatcacttcataaaataaccttgaagacaaatttaagtgttctttcttttaaaatgtagatatcggccaggcgcagtggctcacgcctgtaatcccagcactttgggaggctgaggtgggcggatcacgaggtcaggagattgagaccatcctggctaacacgatgaaaccccatctctactaaaaacacaaaaagttagtcgggcatggtggcgggcgcctgtagtcccagctactcgggaggctgaggcaggagaatggcgtgaaccccagagacggagcttgcagtgaaccgagatcgcgccactgcactccagcctgggcgacagagcaagactccgtctcaaaataaataaataaataaataaataaataaataaataaataaataaataataaattaaaaaaataaaatgtagatatcacagcggaaaaaagggcagtatgaaaagtcctaggcccttcagatgaaaatgaggataagataatatgaaatacctgaacaacttgctttttcaatggggacataatcacaagatgcagatgtgtgtgcaaagaacacacatgcaccagataaaataaacataagtgccctttctacagacagaacacctggctttgtggaaagttagaaggccacacaatgcctcagaaaatgcataaaataaactaaaactaagcactaaattcaatactaaaaccccttcatctgggactcaagttaccattcgattagcatgcaactataataacatatgcctaaactttccaaaaacccacaatcttgaaagaaagtggtcccatgacatgcaggtatctgagttagcagttctgcttcaatgaagagaaagcaaaaaggaaaagggagctatcatctattgagcacttaatacattccaggtgctatgaaaggtactttatttaggtcatctccctccctttaaacatgaaggaacaaatggcaaggtaagaacaaataatattataggtttcaataaacaatatcaatattttattcataattattacctgtctctggcattccctatccaccagtctagaaaaatatgtgacaaaaatgaaacaaaagaataaaatacatttttttctaacttgctgatagaaggttgatcattggaactctaaatgcatggaaaagtcttctatctaatttaaaaggtagatttttttttttttttttcgagatggagtctcactctgtcgccccggctggagtgcagtggcgcgatctcagctcactgcaaactccgcctcccgggttcacgccattctcctgcctcagcctcccgagtagctgggactataggcgcccgccaccacgccaggctaatttttttgtatttaagtagagacggggtttcaggatgttagccaggatggcctcgatctcctgacctcgtgatccaccctcctcggcctcccgaagtgctgggattacaggcgtgagccaccgtgcccggccaaaaggtagatttcttttgaaagtctaactgccatctcttatactcatgttgaaataaattaggaagaacatattaattctcacttgtgttgtcccctgtttttgcataaaaaataatattgtctcgtgttctctcaatttcatacttgaaaatcagagggcacagatatgaggatacatactgatgctagtccaactatgctgaatacccatatcaaacttgtataccttatataattttaccctattaaaacatgatcattgaccttggacaagctacttaacagctccaagttgaaattttctcatccgtgatatgggtctttctgtaatatgtacttatagagttgttgaagatattaaattacataatacatgttaattatttagcacatggtaaatactaatgaatataggctatttatcctagtttgtacaatacctacccaaatggtgagatctgggaaagaaatttaacggtggtcacagcttaccaaagggattttctatcctaccaagctgacaagctcctatcctatacttgctgagagatgtctgattactgacggtgcacagtttaggcctaaggaataactctcggtatatacacaaacacatccatatgcagctccattagaaaatatatcattaaaatatcagtactttgattgtttttccaactaaaatataatattaagtatatttattaacatatttaagtacaacatatagtaaaaataacatgaataatgacataaacctattaaaagataattaattatttaggctactgatttgtatacccccatcaatttataggaactaaacatatacaagaagatattatcctttggggcatgtctagatttcaaaatgagtctaaagatctcttttaatgtttttcctgaggaaataaagcattttattttaataaaatatttataaaactggctggattattatacatcagggaagacaagttagtcttagcttgaatatcaatggtgattaattagcaatggatatgtgctccccagagtgccataccataaggaagtgtctggaacaaacccagataaggtgggaggtctgagagctgtatatttgctatactggcttttgttttaattttaaatatatattgtcagtccatagaagctctagatgaaacaaaaacgaagtttcccattttaaataaatacttaagaaaatttaaaaagtcgaactaaaggggaaactttgacataaaattttatgaaaatatatatttcttttttgaggactgtatcattttggtgcacactttttttttttttttttaagatccagggtacatgtgcaggatgtgcaggtttgttacataggtaaacgtctgccatggtgatttgctgcacctatcaacctatcacctaagtattaagcccaacatgcattagttatttttcctggtgctctccaatcccccaccgccacctgcctctaggccccattgtgtgttgttcccctccctgtgtccttgcgttcacattgttcagctccacttgtaattgagaacatgtgatatttgattttctgttcctgtgttagtttgttgaggataatggcttccagctccatccatgtccttgtaaaggagattatctcattcctttttagggctgcatagtattccatggtgtatatgtaccacattttctttatccagtctgtcattgatgggcatttcatttaagtccatgtctttgctattgtgaatagtgctgcaatgaacatatgtgtgcattcatctttataatagaaatgatttatattcctttggatatatacccactaataggattgctgggtcaaatggtatttctggttctaggtctttgaggaatcaccacactgtcttccacaatggttgaactaatttactttcccaccaacagtataaaattttttgtatctctctgcagctccgccagcatctgttgtttcataactttttaatagtcgtcattctgactggtgtgagatggtatctcactgtggttctgatttgtacttctctaatgatcagtgatgttgaggggtttttttacatgtttgttggccacataaatgtcttcttttgagacatgtctgtttatgtcctttgcccaattttttttttttttgagacagagtctcactctgttgcccaggctggagtgcagtggcgccacctcagctcactgctacctctgactcctgggttcaagcaattccctgcctcagtctcccaagtagctgggattacaggcgcctgccaccttgcccagctaatttttgtatttttagtagagacggggtttcactatcttggccgggctagtctcaaactcctgaccttgtgatccacctgcctcggcctcccaaagtgctgggattacaggcgtgagccaccaaacccagcctcctttgcccactttttaatgctattttttttcttgtaaatttaagttccttgtagactttggatattagacctttgtcagatgaatagatttcaaaaatgttctcccattctgtaggttgtctgttcactctgaggatagtttcttttgctgtgcagaagctcttcagtttaatcagataccatttgtcaacttttgcttttgttgcaattgcttttgattttctcatcatgaaatctgcccatgtatatgtcctgaatgccattgcctaggttttcttctagggtttttgcagttttgggttttacatttaagtatttaacccatcttgaattcatttttgtatatggtgtaacaaggggtccagtttcaattttctgcatatggctagccagttctcccagcaccatctattaaatagggaatcttttccccattgcttgcttttgtcaggttttttggagatcagatggttgtaaatatccggttttatttctgagttctttattctgttccattggtctatgtgtctgtttttgtactatgctgttttggttactgtagccttgtagtatagtttgaagtcaggtagagtgatgcctccagctttgttctttttccttaggattgtcttggctatacatgctatttttggttccatatgaattttaaaataatttttatctaattctgtgaagaatgtcaacagtagtttaatggaaataacattgaatctgtcagttactttgggcagaataaccatttttatgatattgattctgcctattcatgagcatggaatgtttttccatttgtttgtgttctctctgatttccttgagcaccactgttcaaggagaacttggtgtttacttttgaattagtcgtaaattggctggattttgcattggtgatttctacatttctgatgacaaatgagcaagttgaattagagtagatgagttgatgacagttggtgacactgttgctttgcacttctatatacttgaatgagccatctgatgtttcaaatactaaatgtaaccatttattaaatgaacttagctagacttacataacctaaggtttggatggaaccttataaagatcttgtcacctacattttttcttcacagattactacaaaggtggggggggagagagagtgagacagagagagagagagagagaaatcataaaatctaatgtgattacatacataatttttcccagcaagttattatggctatcactacaagaaagattgcagattcacgttacattagtatccttctttctgcttaaaatagaaatagcacatgatttatttatttaaaggaacttatgtatcctatatataattgatatggtttggctgggtccacacccaaaactcatcttgaattgcagctcccataaatcccacatgccatgggagggaacgagtgaaaggtaatttaatcaggacggcaggtttttctcatgctgttctcttggtagtgaataagtctcacgagatctgatggttttataaagggcagttcccctacacatgctctcttgcatgccaccatgtaagatgtgccttgctcctccttcaccttccaccatgactgggaggcctcctcagccatgtgcaaccatgagtccattaaatctcttttctttatagattgcccagtctcaggtattacttcatagtagcatgaaaatggactaatacaataatgaatgacaaaagcacatattttataaacttctttgcaataagattaatgagaggtcttttgctggtaaaataaaaagttttattatatcaaaacctcatttgtaaactggtttttaatttaaaggtaactttatgcacctcagtattcttttataagaagatgtaacacatgttctttacactgggcattgaaatatctatagtattagagtcttgaactatctcctctctccctttttctcattcataaattcctgatatatacaatgatttgtttcattaagtctataaccagaaacttatgcttgatgagaaaccttttaggaagtgtttgtctgaagctatctacatagcttattgcaatgattaatttttgtgtcaattttactgggccatggggtgcccagaaatttggtcaaatattattcggagcatttgtgtgggggagtttttaaataagttaaatatttaatttggtagactttgagttaagtagattgtccttgttaatgtaggtgggcctcattcaatcagttgaagggctgaagggaacaaaatcactagtttcttcaaagcaagagagaactctaaagcagactgccttcagattagaactgtaccactggctttcctgagtctcctctgtcagctcaccttgcagattttggacttactagccttcatacgacatgagccaattccttactataaatctctttgcatgtgtgtgacccaacctctttcccctccaacacacaccctattagttgtgtcttactggagaactgtgactatcatactcagtttatatacgatggagaggtaatttttactgtcactttataataactgatttaatgctgtcagctgtgaattttagtgaattaaaactcatatcaaggggggcaaatacaaaagctttgagtatgaaatagttttggtacaagtacaaaggaaatacaaactgtcaatgtctgagatatttttaacacaccaaaagttgtacagaaacaattaataaagattgaaacaaaggaggaaattgactttgttttgaggtgattatgtgggagtcagtgagaaacatgcagtttgtgaccctaaaattttctttggatcactttggtgtgagaactgctatgtcactgatggagttggagaagggtttagagccaagtatgtattcttaatgatagtgagaaatctgaggaaattgtttaaagggacttttaagaattaagtctggaaattccttgtaaaaaaaaaattgaggacagtcaggagaaaataccagcaaataaaggggacattgaaaccattcattcagattaaatttgtgcagaataaatgtagagaaaaacaaaactaaaaactaatgcttgaggaattactccaatccagtgggaggagaagaaagagaaggtagtgaaagaaataaacattcagaaagtaagaaaagaattagagatagtctaatgtagccagaagtacatatcccagaccttagaaaatggttttcaccgtctcagatttttctgaagtaaatataaacaaatccattttctgtctcttcttcctttaattacattattatccattggtcaaagcaatatgaaccaattctagtagaaattacattgaaagctccaatgaaataggattttcttgggagtcacccaagaaatagattttctgagcagaggtttacacttaggtatggtactaataaagattatctgcaataagattggcaatgacaaattgcctactatagtaatagcttcattatatagaattattacttggaaaattaattttaattgaaaacaatttatctgagtggtagaagtaaaaagattctcccggcagagcttatacctgctgtgtctacttagcagtgattatttccctaactttctattgactcaaggctttctgtgctctatattttcctcatgcatataaaattatttccacagataggaacacagcatttctttgcatttaatcttcatttataaccaaattactatatgaaacttatatatctgcatctcatttgggaaaaaactggtacttgcaagaaagtttattggcaataaaaagaatgtatttaaatttacacacacacacacacacacacaaattcagaataaagtcatctcctgatagcttctcccatttacaatatttgttcaaggaatgaaaactacatattccttattaaaaacatttttcctccattatgatttgaaattgtcaaataagaggagtggtcatatcccaaatcaaaaattctttttgagctgcacttctccctgattaagtatttaatcctcacctaaaggtctctctaaagttgaggtcttgaaaaattccttcttggtgtatcttccaaatagaaatgcactgttaaagctttcgtacaataagaacacatttggaattacgtatctgattcattgctacagtttacaactagaacctaggagtttccactgaaaactgagataatcactcatggtaatttaagaatcgtaacttttctggatgtttcctactaccatcatatttgtagaaaataggaaatacctgttttaaaaagattccacagaaatgtgtttaatatatatcactatgcacaaatagatgcacaaatttatactgtcttttgtcattgtttttttttttttttttttttagatggagcctggctctgtcacccaggctggagtgcggtggtgtaatctcagctcactgcaacctccacctctcgggttcaagcaattctcccgcctcagcctcccgagtagctgggattacaggggcccgccatcgtgcccagctaatatttgtaattttgtagagatggggtttcaccgtgttggccaggctggttttgaactcctgatctcaggtgatttttttttttatatatactttaagttctgggatacatgtccagaatgtgcaggtttgttacataggtataatgtgccatggtagtttgctgcacccatctccccatcatctaggttttaagccctgcatgtattagatatttgtcctaatgctctccctcctcttgccccacaacccctgacaggcctcagtgtgtgatgttcccctccctgtgtccatgtgttctcactgttcacctcccactaatgaatgagaacatgcggtgtttggttttctgttcttgtgttagtttgctgagaatgacggtttccagcttcattcctgccctggcaaaggacatgaacttattcttttttatgattgcatagtattccatggtgtttatgtgccacatttctttatccagtctatcattgatgggcatttggtttggtttggctttgaaactgcaatcccttttcccaaaaatccccacttttcccactttctgaattaagctcacacagcaggttggcatttaagacataccactctctgggaaaaaaccctcaattttaccacatatctatagcctatagattaactggatcattattattattaatcagtttttaagcccacctcattgaatatatgagactctcaagattagaagatgggacggcattctctaggaaaactgtcttctggatcaaatgacacaccaatttcaagatcttcctgattccatcagttactccctttttccatcaactgtctttgtgtgtttctttcctcggattgaagatatttacatttctgattgacatcaatataattattttttttttccgagacagggtctaactctgccgcccaggctggagtgcagtggtaagatctcggctcactgctacctccacctcctgggttcaagcgattgtcttaccctcagcctcccgagtagtggggactatggagcatgccaccattcctggcctgatatatatattttagtagagacagagagatggggttttgccatttaggctaggctggtctcgaactcctgacctcaggtgatccgcctgcctcagcctcccaaagtgctgggattacaggtgtgaaccaccaaggctgccctcttataatcattgtgatatgcatattaccttcaaaatttatgctaatggaactgaattgcttgtaaatcatgaatgaatggcttgtaaaatcatcctacaatgaaatattcattggaattttttttctgtcctgactcacagctgcataagagaattagaaacagtcaatgacatggatattttatgtgcatgttatcaaataaaattatattttttaaaaatagcacatttgatatcacatatacatatattaagccaggataactttaagaaaatgataccagttatcattactctttatctcatttatctgaagaaaatgcacttgaagcataggaatctctcctccctattacaggggatgcaagcaagaaacacattttgttcttgtgaaagacttaatgggaggaaaaaacagaggctggaaagccctaatctgaccttcaaacaaaaaagtcctttgaaaataatgaagtaagtaatttcctcccctctattggcaatgccatctcaatctctaagaatttcctattcactccttgacctttccaatgaggtcatcaccaaaggaaatgtcttacttcaagagtaagagcagactttaaagatcttaaacaatttcagagtatagaccttgttagatcctgttctcttgaagggaaagagtaagcaagagttttttgccaaagaaataacttctcaatgaatttcaaagcacttgtgtgtgttcggaaagtaaaaagctggactccatataaattctaacatttcaatacattttacattgcctacatcttgaaataatactttagctactgaggattgtcatttattgataaggctacatctgatttaggaacttatactattaaaaaaaacagaagaaatgttgagctgaaaaaagtataaacttttctcaaataaaatatgtccttttgactacatggtttcaccttattcaaagggcaattattttctataaatctatatatgtttgcaatttatatgaaagttttagaaaataatttatgttgctcatatataagtagctacagtgttaaaatttctattatattattttactttttaaaataatttgtatctgatttatggtgtgcaagacttaagatgagaatttagtgaattatatttatgtcatacagaacagcaaaaaagataaatatataaataaatgatgagatgtatgatattctagtcatggctggtcacggtggctcagtggctcacacctataataccggcacttggggaggccgaggtggttggatcacctgaggtcaggagttcgagaccagcctgaccaacatggtgaaactccatctctactaaaaatacaaaaattagccaggcatggtggtagggcctgtaatcccagctactcaggaggctgagacaggagaattgcttgaacccgggaggtggaggttgcagtgagctgagatcgcgccaatgcactccagcctggacgacaagggcaaaactccatttcaaaaaaaaaaaaaaaagatattctagtcatgaaaaataacagttgtgaaagtttaaattaagaaactgaggaaatgataatttttttaaaaattgtatcagctttctttgtgctgatattaaatcagaactgttctaaacatgattctcatataattggttactattttaaaatgacagatattgaatgtgttaataaacctttctgaagccatcttatttcatggcccctcagaagtagaatctgaacacaagatttgagagcgagtgatgcaataaagaagttctgccaaaagaaaccactcagaaagtgtaggaaatacaactggaaaaaacaagtcaagcaaggctatgatttcaggtgaggcaccagcctcagtctgactggatggggagctctggagggtaaattgcactttatagttggtcctatggggaatcaagtgtgctgtgctgttgtattccactaagcattcattagctatgggccataagctgtccacagacaactcagctctaaaaagataatctgtcctcgaaactttccatgccagtctttaccagcaaagcacagagagcctaaggagcggtcacacagttcctatgggggatccacggtttttacatgaggcaccaacattgtctactctaggaagcatattgaattttaattagcaattctaagaattgctcataatattgttgcagataccaccagccgcctaccccagaaccattcaccactgctacgaccaccaccatcactgacaccaccacctgtagctctcttaccctttgctgatttagcctgatattattaaagtgtttacctttacacgatgcacttttaactattagaatgattattggttttacccagccatataagtggcattttccttcacagtggttagtttaaagttagcaagaaacttaatcttcttgatttttcaaggaaaatgtatccacattttccaccctaataaaaaaaaaatgcacagaagaaaatattcttcatgacaacatcatcatgcctgcatgcattgacagaaattactaaggtcatgttgccatcataagtggcaacaaaatatacagtctacagatagcaaagtaaatcatggaaagccacaaaggtttgggtgagacttctgggccactgtaatctccgcagagctggatttttattaagcaaataaaaaaactaaataattgtcaattgggtcttctgtgttagcaaatgcatttttattaatataataatagctgtcaagctattggcctttataaagagcctacaatgtgccagctatatttataagtactttacatatatcaattcattctggtgaaagagaacacatcccatagctgctaataaatatcataattgtcacatataatcaagatatttggctcctattgaaaacgttcaaattatgttgtgttgctcactgaagttactatacattatcactactacttccagcaaaaactatagggaggaaacagcagattatgtttaagtaatgtaaatagccatcttagtaaaatacttacataatatgtgtttttgattttcttaataatagtcttgtgcagaaaaactttttataatttagaagaatactaaactaactattgaaaacatttgtatgtctgttttcatctcctatatttttccaggcaatatgagcagaatactaaccacagagttttcaaagccatatcaaacataatcaatatgtttgtgaaatcaaagcacaaacattcaaatttctgatatttaatatacaaagcgtatctatacaatttataatttgataaattttacatgcttattctttctctgaatgtattacataattacatgagatatattaactcatatgctacaatatttcatttaagaatagtgtcctcttcaaaatcgatttgggaatacttacagcttgatttagctcgacggaataaatgaaaatcttagaagtttaattgttgctagatccagtgagaaaaactatccggtatggtacctttgcctgctattattcttctctatttatctttattagtattctagagttattaagaatagattataattgaaatacgagaagtcctgggaaaacttcatgggcagccacctaaccactttttttatattctaccgaaactggctttaaggaagaacgatcagagtacatactttaattacaagcagaagaacagagtaactttaactttatgatattcagtatttttttattctaatctttatgtgaccctgaaaatttgaattcaggctgggtgtggtggctcatgcctgtaatcccagcactttaggaagcccaggtgggtggatcccctgaggtcaggaattcaagaccaacctggtcaacatggcgaaaccctgtctcaattaaaaatgcaaaaatcagctgggtgcagtggcacgtgcctgtaatcccagctacttgggaggctgaggcaggaggatcacttgaacatgggaggcagagattgcagtgagctcagatcatgccactgcactccagcctgggaaacagagcgagactccatttcaaaataaaaagtaaaataaaataaataaataaataaattcatctttctgagagttaaagctaatgtctataaattttggttgataattaataatatttatctgtgacttcataaagagttaaaggatgaatataaaagaatatgattgccttagtgtgtgaatctcatgtggtaagcacacttgataaatgtcagatcctctcagttatttttttctttgcgactcagagcccacagtaggtggaaataccaataccaaattaccctacggagactaaaaacaggactaaaggagttaaagatatgaacttcagtatcttgcgggagctaagattttaatttatgctgagatgtaaaaaactgacctgatgtattttattccacaagggtatttgaattttaaaggataaacttttacataaatgttattatatatgtttatccaaaatattcgaggacagagtagaactttcatagaggaggaattttcccacggtggtgaaaggcagtgtgccacgcggagggctgcagggacagtagtatagaagggctaaacggtggtgagagtgttggaacattctcacgtagctgacacataaactgtaaatgggatgtgagacaagaaaagcaaaggctaggctttgaaagtgagggccagacttcaaaaatcttgaatgaaataaaataataattaataataatggttgacatacagatttcaaatggcactccaaggcactatgtcttggagtatcaaatttagtttaagactgagagtaggattatacgagtaggagatgcatcctattcacatgaaaataaagagagacattgaggaatagaatgaaaaattaacttcaatagtatgaaacttccgagagtggtaagtaccgcagttatagaaggtaatcatcacccttattgataaatgaagaaactaagtttagatggtcaagataattttcccaggattatgtaactgacaagtcagagaacgggaaatttacctatctaagctttgttttttccaaaacgatgcactgtatgttaagaaaataaatttttagacaaaagtaacaagtcatttgagcatttaaaatagctaaaagctacaatcacacagacacacatacacacacacacacatatccaacaacaaggaaggtagaggtattttggcatttgaaattatcctagtaagaaatgataaatgtctgaaatagtgtagaattatttccctttactgtcagaggctaaattgatgttggaaacattactttctttgataataaagtattgtcattattaagtgtttataaggtatatgtgaataaatcacatagttacttttaaaggtaactcatgctggtgaaaagatatggagaggcaaaaaagccaatgttttaaagttttaatatatttttaagtgtatgaagcaaccaatttattttgatataatcagtggtgaaagtaatggcatcaagcatccgtggaggcttttaatgagaatcatgtgctatgtaaagctgttggacagagtttaaaggatcagaatgttggaggatataaaaaaaaaatggcaaatgcccagttgcttttgtaagggattttaaattaaagcagcaaaccttttaaagcatcacacagtgggcaaaatgaaaatgaaagctaattaacctgaattatttttcagttgtacaattttgcaataatcttccatggagttcatgaccagaggatgactagaccttgagaagtatttgaagaaggggtcaaggtgggagccaaggcaaccatctgaaacagctggcctgcctgggcatgtctgagccagatgtctacttctggtccagagttagaattatgtataaaatcaggtactgggaacaatttatctatgttaaaaagatgtgtgtgtgtgaatggatgtatatacgtgtgctataagaacagaaaatagtatcttaattgtaatagaagaaacttggacagcatgtttcaaaagccttaaaattcatatcattttacacattatttcaattcttactaatttatattaaagatatcattagagcgaatatgagtatttattactatactgtttattgccattttatttataataacaaaacattccaatcattttaattgttagtagtaggggaatggtgaaacaattcatggaatattcaagaaataaaatgtgtgcagccatgaaaagtcatgcaatagaagaatatttaatgacacaggtgtagagtaaaactaaaaattattataaataatcacatctacaaattgttagtttaaaagtatatttaaggaatttatatccaaattatatatgtatttataaaaagacaagaaatacacaaaatattttagattatattatccaaatggagttacatgtacttttttgtttacgttatgctattagaaatttactcatttttataaaataaaattgttttttattttactaaaaatactgttttgagatatcaacagttggggaaaatgtgttagcaaagaactaaaagaaagctgtataagcataagaaatacatttttacttcagcctaaaactaagcccttaacattccttaactgaggaatgtcaaccatctcattacatttccttaggctgcaaaatatgtaagtatacctctcttttcctattgtgcttttatgaaaataatctctttggtattctggtattcttttatgacatatcaattttaaaaaataaagttgtgtatccaccaacacattttcatacattggcacatggtatttataactctaaagccaaagtgggcacagactaggacctgctgaagcagggaatctgagtctcacagggcggcttcaacctctatgaccatctaagaatcttttggaatgatccccatcagcaatgtataattgtacacattttaccatgcccacactaacaccagaaattatctttaataatattttaaatgcataaaatacttattaaaataattttgaagaataaaaatatataataaatattttgtaatagatatatcctgcaattatgttgtggaagaaaagtacaataaggaaagaaacccaaaatggtgacaactttgtttttaagagtgaatgagtatatatgtgaaggaaaaaagaagggagagggagagacagagagagagagggagcacaggtaggaagaggaagagaaggaacagagaagaaagaattagatctcccttttgttggttgataatttaattaactacctttcttaggaatatattatacattcagttgaataaatagaatgacagatagcaaaaaatattcagtgtaacataatgtccaatatagtctaattccagttttctagctgatagtcctgggagtcctagagagagaagactgagggaaagagaaatccctcctcctgactgcttcccagtgacttatgagtgaaggtattaaagccaaatacggtctttctgtgttttccatgttccacctcttttcaagcatttgtgtgagaaccagggacaccttaagggagaagggaatggtgacactgcccttctcctttttcctccaaaatttctgattgtagtaaatggcttcattcaaagttaaccttgcattaaatatatttcaaaatatatcaacttggtaatgcaaatatacatgaaaagaaaatagtttactcatgtagtttatggcatagtgatgctaaaatgagttaatatttattttatgaaagaatacttgtacatatagaatttattattaattaatactaaacatttactgattaataattcggatggttttgatttaatgaagtgtttcatacatgtgtatacgtgtgtgtgtgtctgtgtatatatgttttgctctgggcaacaagagcgaaactccgcctataataataattaatgaattaatttaattaattcttcctatacttcttttttttttttttcactcttactgcccaggctggagtgtaatggcgtgacctcggctcactgcaacctctgcctcacgagttcaagtgattctcctgcctcagtctcccgagtagctgggattacaggcatgcgccaccacacccagctaattttgtagttttagtagagatggggtttctccatgttggtcaggctggtctcgaactcccggctccaggtgatccatctgccttggtctcccaaaatgctgggattgcaggcatgagccacagcgcctggcctactcatacgtctatatttgttgcagaaaatgataaagcgttcaataaaataattctatgcagtagaataaattttttgtggaagtgaaatagaactatgcgttcaaagaaaaaaaagaacagtcaaagatttccagatgctacgaatgaacatgttcatgaataattctatatggatgatggcagggatcaaattgccattatattttcaatttcatcgaatatgttgttaaaattgatagattttatttcaaaatatttctgtttataatgtaccaaagattatacaccatttacaactattacaatgaaaacatttaaatgtcaacctaaaacatttacaagtgagttcctagtttttgaaaattatataaaaggcaattgaaaaaagaaaaaaacactgtcttggaacacatatatccctgtaaccatccacctagaatttggtaagttcaatgggaaaggctttccagtattcatatttgtggacccatgttttagctgagtggtaggaatacagttatttcatttctgagtgttgaataaatatagtgtcatatttgagtgaagattataggacttagaagatctagaaatcataacatccaaaacaagctataggcaagattttcacttctataattcttggtcttcattcataaaaatcgagaccacattaatgcttacttcaaaggagctgaatgtcagcagaggctaaaaaatgtagtttactggatcatattaagaattacaagttttatttgaaagaatatttccatctaaattatcgttctaaacatctaaagaatgtgtcaagcataaagactagtctatctagctgaagtacagagaaggaattgtagagagtagaggttagtggggaggctaattaataggttgtcatgtcagtacaagtgagacgataagtctagcttgcactaggatgctgacatcagagaaggagacaaatagattcaagaggaattggcagataagtgtctcagaatatattgatgaatgcaaatgaggacaatttacggacagccagaattctggtctaaacagctagataggtggtggtgccacgtaacaggagggatcattgagggatacaggagaatcaggtttaagggtgaaaatcatgattataatattggttaggttcagttgaaccagtcttttggaaatggaagtgaatgtgtgaaggtaattgagtatcaagctggagatcagacaggatgttctgatgctacagatgttgacgaaaaagtcactgttattagaatgctctcctgctttctactaacagagataagaactgaagtcatttgcatggagtcagtggaggcaaagaacttcaggtgtagactctgaggatcattaagttgaaaatacttattgtgtagggtggatgaacacattatctagagtaacaatgtgctgagagtaattgcaaaccctcaacctcaatccagaggttgaatgaagctgaaaatagtttgttggaggctggcctccattaccagggaacatagagacctcacattaattagtgtgcatttttgaaattctaatagtctttcttggttgagcagttaaaacaaatcaaaacaaaacaaaaaacctcattattcactgaaagttgctaatagaagatatgggcttatatctgaataatctccatatggatttatacctgaattccacctttcctaaaaaatataataacctttgtgtttgtgtgtgaaagtaatgtataaattcctggagttaaaacaaactaacaaaaaagaagtaattcaatctgggaaatcaaaagctgatgtatatgtgtgtggataagtgtggagtgacaggagttagaagtaggggaggcgtatcagcatctgtggaaagggacttctagtcatatcaattgaaggaaagtttggaggaaagctttggagctctattcctgtcttttgatactaacttaagaggataattgcccttccattcattatggaaatccgaaacaagaggccaggttactcaatgatactgagtaaaaccaggacagcataataacattaatgtattaatgtagtaaggagctgataccaaccacaccagaataacaagttttccttctgtgagttttcctttccatgccattatcctttcaatctcaaagataatggggtggaaggggggaagctaagaagatattctcctctctcagtctggtcccagggaggaaaaacttttgatatttgtatgcatggggtcttctctgatacagtatctagaaaagagcaagaaaagctgaggtaggtataaagattaaatgaacagcattgcagttgccacagtaatgtcagccaatcccataaggaattctagagccctttagagatatcactaattgagaccagggagccaggcctttgaatgctgcaatgaccaattattggacaccaatcactggacacagggaaagagatgggatagttcccttaggttgagaacaatttctgacaagggatgcaggcaacactgccagtaggtaagaaaataagggcccccatcctgaaggatgacataaacagcacctcattataaccactacattttctttcaggttactcttttctttcaaagaaatgtaaggtgagtattgtccactctacccaaaagaatctacacatttgatgcaatccctgtcaaaacacaaatgacattcctcaaagaaatattttaaaaatcataaaatctgtgtggaactacaaaagggcccaagtagtcaaagaaattttgagcaaaacagacaaacaaacaaacaaaaagctgcagacatcatgccacctgatttcaaaatatactgcaaagccatagtaaccaaaataaaatggcattggtataaaaaccagacatgtagatcaatggaacagaaaagataatccagaaataaatccatggatttagagccaattgatttttgacaaagacatcaagaacatacattgaggaaaagacagcatcttcaataaatggtgccggaatatttggatatcaatatgcagaatagctaaacgaggccctttaaacaaaatttaacttaaaattattaaggacttaaatgtaagatgcaaaactataaaagcaatagaaaacaagttagggaaaattcatcaggacattggtctaggaaaagatttcattgatgagacctcaaatgcacaggcaataaaagttaaaacagacaaacaagaatatatcagactaaaactccctgcataaataacaaaggaaacaacagcgtgaggaaactatctgtagattaggagaaaatattcgcaaactatgcatctgacaaaggactaatacccagaatatatgaggaactcaaacaactcaacaacaacaacaacaacaacagcaaaaacaatccattaaaacacaggcatttctgagtagacatttctcaaataaaaaagacatacaaatgatcaacaagtatataaaaaatccgccacaaatcatcagggaaatgcagattaaagccaccatgagataacatctcaccccagttagaatggctactatcaaaaagaacccccgaaaaatttgtgcagagaaaagggaattcttatatactgctaatgggatataaattcatacagccataatggaaaacagtagcgttttttcaaaacactatgtataaaatttccatattatccagcaatcttactgttgaatatttatctgaagaaaagaaaatcagcttatcaaagatatatctgaactcccatgtttattgaagtgctattcacaatgaccaagatagagaatcaacctaaatgtctatcaacagatgaatgaatgaagaaaatgtggtatatatatacacaatggaatactattcagccataaaaagaatgaaatactttcatttgtggcaacagggataagcctaaaggacattatgttgagtaaagtaactcaggcacagaaagatttatactgaatgttctcactcgtatgtaagaactgaaagaagttgaacacatagaagtggagagaattgtggttattagaggcttggaagtataggtggtatgggtgggtagggagaagttggctaagtcatacaaaattacagctagatatgaggaataagttctagtgctctatagcactgtagggagaatatagttaaaagtagtttattatatatttttgaaaagctagaagacagaatttcgaatgttccccaaactgttatgagtatgctaattatctttatttatcttgattaccttaattggatcattacacattgttcccatgtattgaaatatcactagatgccataaatatgatttaggctggtgcaaaagtaattgtggttttgggctgtgaattttaaatcattataactaggctcaaacacatctttattaatcaaaataggagtcattataatcaacacatttttgccaacaagaaataagtttgcttattcctgtagcataaaaatatgtgcttcgggattcgacaaactcttggaaagcattttctgcatcctgctggttgtggaagcattttccctgcaaaaagttgtcgagatgcttgaagaagtggtagttggttggagggaggtaaggtgaatatggcggaaaaggcaaagctttgtagcccaattcgttcaacttttgaagcattggttgtgtaacatgtggtcaggcattgttgtggagaagaaccaggccctttatgttgaccagtgccgactgcaggctttgcagtttttggtgtatctcattgatttgctgtgcatacttctcaggtataatggtttcaccaggattcagacagttgtggtaaattagaccagcagcagacccaccaaactgaacatgacctttttttttggtgcaaatttggctacgggaagggctttggaacttctcagtccaaccactgagctggtcatcaccagttgtcgtataaaatccacttttcattggacatcacaatctgatcgagaaatggtttgttgttgttgcatagaatgagagaagacgacactacaaaaagtcaaatttttggagtttcactcagctcatgaggcacccgcttacagagcttttttgcctttcctatttgcttcaaataccaaaccaccatagaatggtctacattgagttccttggcaacttctcatgtagttgtaaaaggatcaacttcaatgattgctctcaattggtcattgtcaacttccggtggccagccactgtgatcttcatcaaggctcttgtctcctttgcaaaatgtcttgaaccaccactgcactgtatgttcgttagcagtttctgggccaaatgcattgctgagtttgcaagttgtctctgctgctttatgacccactttgaactcaaataagaaaactactggaatttgctttttgtctaacatcatttccacagtctaaaataaatatcgaacaaacagcaagtaataagtcattagcaagaaaacagaaagcaaaaaatgcccattaaaacactatgtaacataaccacattaaagaatgtattccaatatcaaatggcaaattccaacagtgaaaaagccgcaattacgtttgcaccaacataatacaattattatgtgtcaactaaaaataagtgaaaaaatatgaatagaattaacaagagttatcctttgcagaaaccaattctattctatgaactgtcaaatatgatcaacatatccttcacatctacgttcaaatcaaaggtagggaacagttcattgatgtgttctgataagaataagacttacaggtggatttgtaaactttggggagtcattcatgatgagtgtaaacaaaatttattatctttgatgagcatccaaaccaagatacacacaatttataaaacatgactagcttttaaaattcccttattggctgcaatggttgtttcttttaaataagcaaaaggggcctggtgagatctgaaacacctgggtgacagtggcatcaatcaaatgtctctttcatccatttctttaccctgatgtaagaaatctagacgcttgcaaaatgttccctttaacaagacgaaccacatttgtctgtaactaccgtaatagtttattcagaaattcatgcccctaacatttgtggggctcaggacaggaaatcaaatgtaagcctgcataccatatgtctaaattcttaaaagttataaatcaacctaaaaacccattaaatatattctattcttccacattgaccaatatagctttataatgatcatgtgcaaatatgtgaaaagctaccattttcaatctaagaacatctgcaaaatatcaaatagcactgaattttattattgttgttcatgtcaagcatcttggagaaggccatgttgtctggattcagcaagttgttttctgattaaaaggcaaatgtgcttttgccatttacaaagaattgtattacggcttatggaaatacatattgttttaacatttacccaaactgtgactttcaagttttggaaattactaggaaatgcaccagctaaaagtcaaagggattattgttagttttatctccactatttttacttcagtatcaatgatgaagtcattgcaaaagcaagaaaaggataatgtcaaccagggcaaacacaaaatgagcaggtatataatatgttaaaaccctccacggtttactttgtttcaatacctataatgaaaatgtttgctttttcctagaagagtctctacccagtttaacactaatttccctgtgtacctgtttttgagttttattatcaccatcaaataagcagtttaaaataataagcccagatcttatttattaaaatttatgggccattttcaccaggaaaagtgaagaatcttctgaacagccttgtatacatcagacaaaatatgcataatgagggcagtaggtacatttaaaattatagggtgacacactgacttcctttaaaagtaaacgaagagggaggaaaatatgagtttttaaatattaaattccatcataattcctgatatctgattaagtacactccacttttcttataggcagataccaatacaatagctttcaagtaatgtttaaaatgttttttttctctttggacaatcacattgtacgtacctctcctaaagaatttcccactttaagacccaatattccaatacaaagggtacacagatgtaaggccatgtagagaaaagttaaaaataaaaactacagaatctggtacagctggggataattagtgaaaaacaagtttttgccagaaataaaaggaagttgggtagacaaatttttctttagccaggttttggaagattcatggaaagagaacatatttacaaccccaccccttctcttctattccatagaatctagcaaaaaaacctccatcatataatacttctttttaataaaacttggttgattcaaataacatttgaaaaatcaatcaattttgaggttctctatatctttttaaaccaatcctgaagcttgaacatgctgtttgaagacccagagcaatcccttccaaatgtctgtatcattttattttctgtacttgaatgctagtgtctgatagtgcaagattactattttacaaatactacttcacgtattttccttcagaagcaaatcttcttctgggttatgaatttaatgacatgatgttgctctcataaaaccaaactttctatcaagatttcattcaatttaatacacagtaatcagcatctgctctgtgtcagatagttatgtggggatacaaatctttccacataagactcagtttctagcctcaagtcccttgcagtctagctaagtaagaagacacaggctgtgtttccccttgatgattaaaatgttccatgggctgggaattctgtgcactagacgttgtctgcacttgatttctatcattcaacaagatacttttttttaaattggtgaactgaaaatacttccaattgtatatttcctttctgttctcattgcaaaagtattcaatcaatgaggaaattaatcataatgaggaaactgactgaatataatggcatagctataaatttatataaaaatatattttttactatgtaggttcttcaaacgaagttacacccagtcattctatgaatgagagaaaactggatttgttcttgtgaagccaatttagacttaggttggcttaaatttactttttatttaatccatgtgctactccttaaattatcaacatatagcaactcaaaagaatacgtttgcattaatttatgatgccttggtaaagagtttggtctttgcttttctttcaagctggagccatcgcatgaatatttacactttaaaattcacaaaaggacattctcacaggttcgctggagcttaatgagtagttaatatatctgcaccgaagtgacaggtaaggaaatgtaagttttatgtaatgtttccattttggattttgctttctttcttgacatccttcccttccattatactgttacctctcttacttctaaatatttccttttattttccagtacaatcttcctgcaactttttaatgttgtcattaagcctaggcctgatgtatgttctttgcttaatctctaagaatcaggtgaagaacaaacaaggatttataaaatgttgaattagtgaactgatttgatatgacctcaaggcagttaaactttctatctattgaagtaatttaacacaggagctgaaacaattctctaaatctgtacctaccatattgcagaatatttgcaacaagtattttaatatccaacataatttttataattttctaaagaccttttgtatagaacactcttgataataggtttaataaaattgccttacagaaaaaaatcattattatttttactccagcagtgagagtggaaagactccattacactttactttcttgaaaatgttaaaaaaagaaacactacatatcattaatattccctaaataagatatgtgaatccaattacaagggtcttcgaaaatcatataacaattagtttagagcaattgattttctcttcaacgaacatcttgaaagcattttctttgtgtgaagaaacttagaagtttcaaaaccaacatggtaaaatctaaatatgcttttatttctgtaaattaaaattatgatttaagaatatttattccttgatatgtctctattgtattctgtaatcaaaaccctagaacaaaaataaagtgtctctcattctagtttccaaacaggataataactgacacttaacatttattttatttaaagtcctgttgtagaacattccaccacggaacactgcttacgactgggaaaattcttacttctttaatgcaggaagtgttcaaccctgacacatgcatggcaaagacatccaggttgcacaattgtctaaactccccgccaattacttggaccaggactcccaaaaactttatgtgcttttggcttctgctatgctctttaaaacaacatagtcctaactaactgcattccactgctaaagaacaaccctgactccagataatcagtcactgaggtccttgccttatcaccaccattcgttcaaaacagggaccctgtgtccttttagctcctctttttgtcagaggctcatgccagatggacaccactcttgccctacctctcatgggtctttaacctttctgcgtgtttctctctctgcctaggatggctatttctaccaatcacgttaaagtgactaacagaatgtttaaatttcttcaacgtaaatgatagcttatggatagcaactattaatgggcattttgtttttttgtttctgggtttttgttgttgtttttaattaattaattttattttatcttatttctttttagaagcaccgtctcacttgtcacacaagctggagagcagtggcatgatcatagattactgcaatctagacctcctggcctcaagctattcttccacttcagcctcccaaagtgctaggattacaggcatgagccaccacacctggccaaatatttagctttttaaaagaaaagagttggtcattatttgtaaagaaatctgcccattcccttagtaaaatcagccaggtcagttaccggttcagggattaaaataaataatttgtagttgtgttataatagacactattttccagggtcggcaatggtaaacaaccattagaaacagaaacttcgagcaccctgccatagtgaaatgtggccctctgtggtaaattaaagatggccacaaatattttcctatgttttatattgagaggtgaagtctaattcccctctccttgaatttgtgctggccttaatgatttgtccaatagaaggcatgagggataacattcttagacttctcaggctagctcagaagaagtctcatagcttccactagatttattagaatgttggttctcagatcattgagatgccatgtaagaagttaggctatcctaagaaactacaggaagaccctgagatgacctgaagcgagagaaagacacagccgtccaacaagcctcagctgtttcaggccctaaggatttgagtcatcctagctgaggttccaaactttgggatcaggtacgtgttatctttactgagctctgcccaaattgtagattcataagcaaaatcaatgattgttgttattttaatccattaaggttttatttctcaggggagaagtgttactcagcaatggctaaccggaacatcttccattattattgatgatgtcagtttgaaattatgaaaatttttggagagtttccttatcagatctttcctatgtagtaatatagttggagccatcacaaagccgaattttgaagcaggtaaaacttgtcttttatgccctctattttaaatccctccctctctctctctctgtgtatgtatgtatatatatacatacatatatgtacattctccacctatggcatttcctaccaactgagcagtttaacagagacccaaagctccccatggactgcttctcactgctttttccaaataaaccctattagaaagtataattttaaatgtatctaatttcatccatttttagttgtgactggtcattcctacttggttatttattttaggattacttcttccttctacaaacatcattttctgttctcactatctctacatcagttctgaaatagataattactagatcacatctgtttatcctaaattcacccaggccactctctacattgcatccaggagtctttcctgaaatataactattaacactaatctgctttgtaaccctccccttcacacatcatgtataacacatacacacatgcgcacgcacgcacacacacacacattctttagaaaagggactaaattctttaaaatattttacatagtccttaaaatttgtctttgattttggtttagtcttattattttctcaccattaccctaaactctgaaccagagttctaattccaggaaacattcatagctccttgatgtgtgcactctcatttccaggtctctgaaatgttttttacatgagtttctctgctctgtggaactcactgaatctctctgccgtttcttgtacccttcaaccttccaattgtcccactgtccctcagtcaaaacaactattgtgataaagacttcctgggcccatctttcttaatactaattatataatctttctatttaatcccatggaagcgatagatatctctacaatatccctaatattattatttggttttcagtgtatcataaatatctaagtgccagtagagtgacttattcactatcctttgtgatcctagtgacctggatagaagaggaaacaagtctgttagatgcataaatatataagtgaatgattatttttgtgtgcccatgttgaactatgtatttaatatacaagaaatacaattttaatatcaaaactattattattatattattactatagctacttttaatcttaaattgaaagatttcaaaatgcatttttgtaggattacttcctaattctttctctttgggtaaaagcacccaaaacttttccagttttaccatgagctcacatgtttttataacatttatgtaaaatatcactctaactagactacttgcttatgtagtagtatagtagtttccctttaaggaatgtataagaattatatattgctgttaacaaattaataagatttttgttgttcctagcatttatagagccctggatggccactgggaaattccttcaaatagtaatctaaaatatacttcagtaaagtgactcttgtcagtggcaataaagtaggtcattgttcatgatcattaccaaattttttacatttcattgaattattttaccatcagaaacaacttatcaaaacacagcaatacctgccaaaatacactttttaaatctattaattcataagttgtataaaatagtgcatctactttataattttagattaatacaaccataatcattggtttatttctaaaaataaaaaatgcttattatttttaagaacaacaatatttattatttcttaaaatagcatttatcttttaatgtagtctgttgagcatgtttcatatttaaaatattagatttctagaagagatattgagctaagtgaaactattgcttggaggaaaatggggagagaaaatgggaaagcaagtagaggtactaacatgaaccaggaaaagctgaatcacgtctacctgcaaatgacctgagtatcacaagtgttcttcagttagaaaacaggttattgatagggtatcctatcaaggtggaaaaggagagcatctaaaccacaagtttctgacatagctgttgacaaaggcttgagcaatacagctttattccagaacaagatggcctcagccttcataaatggcccccaaaatgaaaataagcatataaatcagcatagaagattagatgtcaaagccaagtttcgccaaagttaatgattccatttaaatatggctattgaatgtgttcttgacaaatgaaaaagaatattccaaatttttttaaatgggtacaaatagacgcttttcctaagagctagtctgtatctagagagaagacagaatcagaacgtggcagaaacagaaatctctctaaagtccaaataagtgaattttattgaaattttttttttttttttttgggaggggacagagtttcgctctgttacccaggctggagtgcaatggcatggtctcagcacactgcaacctctgcctcctgggttcaagtgattctcctgcctcagcctcctgagtagctgggattatgggagcctgccataccacccagctaatttttgtatttttagtagagactgggtttctcactgttggccaagctggtctcaaactcctgacctcaggtgatctgcctgccttcacctcccaaagtgccgggattacaggcatgagccaccgtgcctggcccaagtaaataaattttaaatcactcttaagcaacctactggaatgacattatcaaacatccatcaggtacacttaggatgagagatatgaagacaaacatgcttataactcatcagctctcaatataattagattttggttaaactgtaataagaacattgtactgcattaattcaggtttgttttcttttttcttatgtcttcagtaggaatttattttgaaaaagctatacacaacttgcttgtgttagagaatcattgtggtcaaaggttataggaggcaaagaaattcccattctagatgcagaagagcctgcaaactgagcaagatatatgtaaatgcaagatatcagaaacaggtctaggagcagatggtgacccctttctacatgttattcagctactgcaatatatgttaatcaacttgaataatgtatgtcattcaaacctactaaacatcaagctacaacgaatgacactgtgaatatattttcattgctcctctaattatgtctttgatactgattttgacgaatggaactagagagggcataaaagtatctgtattgctcttgagacataccccatgccaaccatggtgtcactcacgtaataaatttttaacaaatatctgttgaatgagtaactgagtggtacaaatcagttgcaatgttgtaattacacatcaatcaacagcatattcactttcataaatgctggtagactaataataggtatttcaaatttcacatgtccaaaactgatttccgtttttttcccaaccataatattatcctcctgcagactttcccatttcaatcatcaacatctctatcctctctgtttctcaggttctaccttcaaaatagatatttatggaaccagttccttctcaccacctgcactgttgttaccattgtgatccaagtctccatcacctctcacttagattatttccatagcttcttggctggcctttacttccatcctgtgccatctacttttggcatagccacccagtgtgatcctcaaaaaacctaattcagatcatggctttcctctcttctaagcctccattggctgccttacaatggccttcaatgccatagatgatttactcttgagctagatgactaagtaacattatcaaatatccatcaagcaaagttaagatgagagaaatgaaaagaggcaggatactctgtaactcaactgctctcaatataattagattttgactgaaatacaatgagaaaattgtattctgttaacttggatttcctttttcttctgctcagcctacctcttactactcctccctttgctcattcttctagaaacactggcttgtgaaccacttcttaaccatgccagttttgcttccaacccaggcttttgaacttgctgttttcttttgcctggaaccattcttcccataattatttccatggctcatttcctcgtttctttcaggactggactcaaatgtcacctgcttagagaagacttatttgacttactacttaagttttcccattttctagcattccttatcttcttttcctgctttatttttttctatagcacttacaaccatctagtggattttaatatacatctcccctagcccatgacagaaagaaaactacaggaagacaggtatgtttgtgaattttgtttactactatacctccagaacctagaacaatgcctaacacgtaagagacactcaatgaggctgggtgcagtggctcacacctgtaatccttgcactttgagaggctgaggtgggtggatcacaaggtcaagagatcgagaccatcctggtcaacatggtgaaaccccgtctctactaaaaatacaaaaattagctgggcgtggtggcacgcacctgtagtctcagctactcaggaggctgaggcaggagaatcgcttgaacctgggagtctgaggttgcagtgagccgagtcatgccactgtgctccagcctggtgacagagcgagacttcgtctccaaaaaacaaaaaaggatactcagtgagtacttgttagatgaatgcatgaatgtcaggaaagcctaatcaccattactcattctattgctatatataaggcaatgataatttatttggctcatccagaaagctttagcaagactgataacaacccccagggaagaactcatgaactccatactgcccaacaaaatctttcttggcttctccttcttttttgtcactcctcctcttttgcttttctccaccctatgctacctcctaataaaattccttgcttgaattctgtccaatgcaaggctcacaaaaataagttaaacagatctttccagacaactagtgttttctactatcctggaatttcactccaatacagtacatttctatcacactaccttttaatgaaatctttaccctgaatactcaaaaagtcatcttctgtatgagcatgtctgcttttagtagacataaatggctagcctctgtgactgttttctttttaacaataaaagaagaaacaaacacaatggacaattattaaacaatggacaattgatcacaattaaacaatggacaattgattagaaaaagctcgcttgctaactgagtaattctttgacacacagttttcatctcattttattatgttaaaaaatagaataacaataatacagtaaaaccctgttttgaggcaccattatagtgtaattatggatttagttatacggcccaccacctcatatccctgatgtatcatatagctcagcatattacacaattcatcaagggtaaaaattatttttcccaatctaggcttaattatatatcgagtgtgctgctgaaaagtttcccctaccattatctcttctcagcataagggggacagtgtctgtacattgagaagttattggtattgctattatttttagcaacctatcatcatgcaccctcgggggtgagaacataagttaacagagatgataagggacccttacacatacagaagaagcagagtgtctggagctacatacactcaagagctacgaattacttcaagagaatccaatatgtactaagcaaaatttaaaattgaactgctcactgcagtttcaacagttgtaaagtaatgtcccctgtattcgtccattttcatgctgctgataaagatatacctgagactaggcaacttacaaaagaaaaaggtttaattggacttacagttccacgtgactggggaagcctcacaatcatggtggaaggcaaggaggatcaagtcacatcttacgtggatggcagcaagcaaaaaagagagagagcttgtgcaaggaaactcccatttttaaaaaccatcagattttgtgagactcattcactatcaggagaacagtgcaggaaagacccgcccccataagtcaatcacctcccaccgggttccttccaggacatgtgggaattgtgggggttacaagtcaagatgaaattttggtgggaacacaaccaaagcatatcatcctctaaagaataataatgtcagtaataatagcaaaaatatatagtaatgatagcaaatagtaatagatgacattaaatgagcactactatggccactgatctaattattttacctgcaataattcattacagaaataattctttgtaggatctgaattttaggggaatacatgtcatgaaatctgaggattttttaaagattatcatgctcccattaggcaagggaacactcattgttgttcttgtctttgccttcacctaagaaaataatgaagggtggtaaacaaggataagaaggaattcatttatttatttattttcctgaaatacaaatgaaggatcgacaatagaaggaagaaaaaaaaagaagtgaagtgtagatatttcaaggacatagataactaatgagctaatgagcgttgaatcactactatatgtcaggcaccgtattaagcattctacaggtatttcattcaatcattataatgccaagtgaggtagggatccattatcctcttcacagtgaagagaaaaagaagcagttaaatatcttgactaaggtcatagtgaagagaaaaagaagcagttaaatatcttgactaagctaataataagtggtgaaaccgaaacaataatcttgtcagtctgacttagctctcaggcatatactatgagcatgtttaaccttatttaaaatatttttattttttatgtgtttccccatgatattgagcagtaaaaccttacaataaaaagagactaggtggttttccttcagggcaactaggaagtagggaataggggaaacagcattccattccacagtctactttgtagagagagaccagacagcaggcaacagtagaaaagaagaaaataaaacaggatgtttttaaagacctattataagtggataaacaaaggaaaaagcaagaaaaaaggataaagttttcctactttggtttttttatttcttttgttgaaattccaaaacttattctattttgagtattatttattacttgcccttgaaaacattgcatagatgatctgttggaagattaagaccatgagtgtacagtatatccacataagatgaattaaatccgttatttgtaaccatggaagaaactatatgtttttattttctttttttgtcaccaactcaaaatgcaaatacacacactcatagacttaaatttagtaaagagaaaacaatgataagaatggattgcagctcaaatatctacacatttctcatgaccctaaataatttgcgagcacaaaattatactagcacttggttacatttcaggaaatattaaaaaatattgattaacagtgatttattaatattttagaatagaagattattgaatgtgttgtagatcataataatttgtgagcacaaaagtatactattacttggttacacttcaggaaatattaaaaaatattgattaacagtgatttattaatattttagaacagaagattattgaagattttgttgtagattctatttattttctatgaaatccaaataagatatattttccatgaaaatacactgtatttgaatttaaatcctgggatcatattaatgcagaaattacaagtgtgtcatttagcacataattttcccaaatggagacattttgctgaataacaaactgccaaattgaaggtacagcatatgataaaagcagtttgagtcagattttccccaatgaaatcaaacaacaaattgtgttgatttaattgtgaacttatacttatggattataacatgaaggaatgaatttttcactttcctgttacaccattgcctttatttccaatccagaattacagaggagttgtaaggcaattaagggtgttacacagggcttttgggagcagcactggaattttaaaacaggtttaatggcaatttttgataagtaatatactgtaatataccttttaaactctacatggactttaaaatcttttatggaaaattatcaagtttccataataaaaaaatgctctgctttctttggggaatatttttgggaaaaataacttagttcaattttcatggaaaaaatacctaaatagtagtattgctgttcaaattgtgtcacatttctttttgtgggtcttttgaagtaaatcaacaggtttatgtaaacattatgatttggcttctcctagatgttagaaagaagcagtgtgtaagtagtgacgtacgtgggctttacgtaaagaaaatgtgccattttttcaagccagatatagcttctgtatcaacaaatggaacacaaatctttagtctaggacttagagttggggaaaaagggaaaaaacaactataacacttaaatgaaatctttgtatcttaggtttgttgaccagagtattatatatatatctaatgctactaaaattatgatgttatcgaatattcaagttaattcaataagtggtggttatctgtagtaatcatagagaaaggaactattactatgagggacctgcgggtacaggaccctagtagtaagttagagtagaggtaagtatctgagcagcccattctgctttcctgtgaaaaagcaggtatgcaacacatatttgctgagcacaccaaggtctaagaatgatacacattgagaagcttgaacattattacatcttgatagcagttacgaaaattgttaaatgaaggttcttatggtgcacctagaaatcactctttaatccaagatgtgattttcatttccattaagcttccacccacacatactaatgtcttcttaactttctgtataattccttggccttttcttatagtatcttaggttatgttagtctttaatttctatccgtttacttataggacatattcagctgcctgttagtcacaccacaaacctttgtgcagacacttggaatatattcctaattgttttcacagttgattatcgtggagtcagctataaaagaaagagccactctaattagtgcagctgattcctatgttgagctgctaacatcgatctgtttgaaagtctctttttgtgcatttacacacaagttcttaagcaatgatgacagcagtaccctaaatattaaaaaagaaagaaaaaaagaaaagaaaaaagaaaagaaaatagcatgtagaaaagtcgggtagagtttattccatggcatagtcattttaaagcaggtagtttttgagaagaaggtgttttttttgttgttgtttgtttgtttttgttgttgttgttattgttgatttgtttgcttgtttggagaaaccagcaaagtagaactccaaagtccatcttttagcagtgtacctcagggttttcaattcagacacaatgtatatgggttgacactttccagatcattgaatgcaaaccattaaaaagaactatatgtagccaggaaataagaaaacattttatggctctctagaagacagactgggtgtctgcttctgcatgcccttttcttttctttccttttttcttttttttttcttaatctctaggataatgctgacaccattgcttaaagttctgaatgtgactgagaataatcatttcacacaaaatatccccaacgggtctgtcaactggcaaacagctaggaatatcttttgacatcttgctttgcagaacagcaataatctctcgccacctgtcaattccacatgtctcatcccctgcccctggtgattcttggcaatcagcagccagtgcctgtgtaatagcacttctgcctccttctagtgtagtgcttcaagctgtcctgtttctcagagagcagacacattgcctaaaatgaaatcttagaggtactgtccacactctgtcagtagataaaggaatcagaactactcagacggaaaataaggtgcaagggggtgtaatatggatgtaatatggacttgcatacatgcttctttggcatatgtttccctctataaaaaaaattaagttgtgaaatatgttaatgacatcattgacgtagataaaaaggagcaaagaaaaccaagaagtttcaaatgatacattttgaatttagcaaaatgtggttttactaggaaacattaatcaaatgtagatgaaaatcaaattcattccatatttctccccaggaaataatgattaataagtgagtgagctttgaattcaaacaaactttggttaatgaggaaaatacaagcttttactgtaggcaatggtcttgacatatatttttttcctcatttctggaacaactcttgcctcatgattcattgatgggatacctatgaatgaatagttgcataatggtgaagagattgtgtgtgtattttgaagcctttcattttcttctgtcttccctgattagtcatgtccattatccagctagctctaaaattcacatcctaattgctcattagtttagtttagtgaaaaatgatttaaaaattattattccacctttaaaaaatctaatagccattatggtcgaaggataaaaccactaagcattatatttaagaaacataaaaatcatatttaatatagtgggaaatacttcaaactagaaacggcgtagatgagagatttgtttaaaacttatatatactatgaaagtataaatgcaaagcagcaaaacttgtttaaaagtcagtattattatatttgaataaaaattctttgataattactaagcaaatttcataaaatgggtttttagcaatttaaaaaaaggaatgcaatttgaaaattctcactacattttaaatgtacacatttatgggcaagcattaatcataaatatcaacaagttacaaaaaaagccgcacaattttattgcatgaaaatttgttttatgcacatatttcttatgatatatattcagagcacaaataagcataagtatctagatggcttattcataagcaagtgatatgtatgtgtcacaacatacattttatagttggtaatgtttgctgaggtttctcaaatggcattgaagttagtcaaggtcaaacttcaaatctaaactttaatcttacatccatttcaaagattctacatgcacacacacacacacacattctagatacccacacacatacacacataaacacacacacacacacacacacacacatgcagaaatgcacttacaaattccagccttagccactacttgggtcagcctgcctgggctgtttgtgtgtgcgtgtgtgtgtgtgtgtgtgtgtgtgtgtgtgttgtgtgtgtgtttgcatgttttttactttttttttcctcattacttttctatttcttacccacttaatgagctgcaggagaggtgggctgggagggaaaggggcacatcctacctcacttgtacattgacactggagcagtcaaatgtcaccgctcttgggggtcagttcctccagctgactatctcctgttggtgccttccaggctccttggcaacctctccactgagcatcgccatcccgcagttttctgaggcattccctccgcagcaaacatcctgccactcagcctctgctccatgtgcatatcaacatgcagcccctgactcggacttgcttagtcctacctggtggccacctttagttgggttcatagtgaaggctctgccttttcttctatgtactcccgagcctatatcctgccagaattgtaagttctattcagacacctcaatagattggcactggtttctatttcctggaccccagggacccacactcagttcttcaaagcatcctctcactgtggtccccaaagcattctctgacatcatccttctaccaggggtgggttaggaagtagaaagcatccacttctttccacctcctgttaggcagacaactatcttcacggaaaacagtacttacaaattcagcaaatctagcagatgatattctagtacttctgtataaaatatatgcataaaatctagtttttgcctgagagtgaaaataatggataatatccattgtaaccacccattagacagaaaaataggtagatatagcaatctacacatataaatagatagatacatagatatgtagatatatagattataggtacctatgcacagatatattccaaacactgttgccaactgatatgacttggatctgtccaaatctcatgtctaattttagtccccattgttggaggtggagcctggttggaggtgtttggatcatggggatggattctcataaatgttttatcaccatccccttcgtggtgtccttgtgatagtgagtgagttcttgtgagatctggttgtttagaagtacgtggcacctctcccccacccccacccccactctctttctctcttgcccctgttctctccatgtaatatgcttgctccctatttgccttccattgtgattggaagcttcctgaggcttccccagaaacagaagtcactgtgcttcctatacagcctgcagaaccatgagccaattcaacctcttttctttataaattacttagtctcagtcatgtatttatagcaatgcaagaacagcctaatacaccaactaaagatatgtattgtcattaatgacttgaacattctcaactattcatggcatttaacaatgcttcattacaaaaaatggattttttacattttatgtgttttattcatgataaatgaaatgtgctttattcatgataaatttatgtgctttattcatgacaaatgaaaacttgttctttttgtttgttctttttatcatgaataaagcacataaaatgtacctttcatgttacaggctaaaacgtttacattgcaggcccttttattcctctcctacccttaacctccccaaccgtatacatcaataaagaaaagagaaagagaaatgaattagcagtgagcagtaagtggaaaagatacaagtttttttcatggccaagtctaaagtcattttgagttaattaaacacaagctactactaagccaatagaggacatattaagtctttaaaaatattaattgtgatttttctacactagatttctgttgcttgatttctcattcatgactaaaattgttagacctgttaaaatataaaaacacttgggaaaagaatcccaaaacaattgctcctggaaagttgccatcttccctggaagtttccagtgagctgagttattctcattgcagcacgaaggacacatagacccacagtatcattccttctgtttgtctttgcattctcattttccaggctattgcatacagcaactattcaaacgttttttggataccttcattagctatggcttccaaacttttggttaaaatagtaagctaagctgagcaagcaacattttggccttttcattttattgggcacactggtcatttattgcccctcccccactctattcccctggcaccagcaccgaggattccctggatggggatttggctgtctggctagtggccacttcactgcatgccacacatctgtgcccttggaatctgaggccttgtcttcattttagggcactagaaatatttctgccaaaactccaaaagttgtttctttcttttctattcttctctttttttcctcctttttcttttctcttttccttttcttttttttaaatttctgagaacaatataagctacacatacatttgatggtcaacagctgacactactaggaaacatatgtgtaagagcagatttcaaaggccttaatgcatctcctagctccatttctgactctataatgttgtagaagtcacttaaatctctcatcccctgttgatttaactacaaaatgagaccagttatagaattgtgtgagaggagaaaatagttgatatagatggaagagctttgaacattctgcactctcacatatgcattgtattagtattactattaggtcagatggaccctcatctatgactgaccaagatgctgggtacacgagctaaaggaatccaattcactatcccagggttgcatcgcagtggatttcatacaggccaagaaaaaacaaaaacgtttttaagcctccatcctcagatcaaaacaataaacaaaaaattatgatatccttaacaatgtcctgggttaatattttattccataaatcaagttttcagaactctttaccctctaagagatacagattgaacatgcctttataggctctgaatttcataacttctaatctatgctcataacctggaaaatgtcatcatactgaatgcccacatgaaaaggtacttttaggacctgccagtgacagtttatacacacatcagtcccttttcaaatgtcatttccattagtatcttacatcagaatcacaagtgaaatgaatatgctgtaacctagtattttaaaaggttatgttgaaggagtagagaggcttaaattaattttcccttttctcatccagtaggcctttactcaataggatttcctacaattctatcttaatccatgtctctgtggatgaaccaaacagaccacaacatagaagagcctgccaaagtggcttcctgccagcagccctctctcctctttaagatagacttcagcttaatgattgtacagtgatccaaatcaatgaagaaagcaaagaacagacatgtatctcattatcttctgcaaagatctatttgtttagccatgtgcaaatattgccctaaaatggtaagttggttagcacatattaatcatttactagatctattcaattcctaaaattaatgttaatttaatatgcagggggagttgcatggctgttttcgttgctgtagacttgatataggcagagaacaagcagaaaattatttagaatacccagtggaatccatcagtggaatccatcattatatttttgagactattaattagccaaagattgtaaaagtattttctagcaataccagttaaatgaagtagaaaagttaaatgaaggctaaaagcccacacaatgctatcgtgctgtaagtattgttctcaattattggaagtacatatattatagaagctcagtatgtatttcctaatgaactgcttcatgtaaattatttcatgccataatcttatcctttcctatactttggcaactgttgagaggctggaaaagactgtattatttattctgaggccaaaatataatcatacttgggtaaaagatactagatgttcattcactgaacatttattacagcaaattttcataatccataacacttaggatgtttacatctaatttttatcttgattgaattcagcattaataaatttgaatttttttcactaaaatattatttggcctatgaatatcctggcaaaaaccaaccacataagactaggtttttatcaatttataaacaaataggttgattttgaaaaagttatctttttaagtatctacaaggaatttagaaaatgcaaaatatcttataaatttgaaggttgatatagtagattcactttaactctttctacaggaaactttctcagaatatgaatcaataaaataaataaaaagtgtttacttctgtatcttatgtagaaattattactaaggtaggaatgaatcctctcttaatagtccatacaatcactttattcaatcacttatatatttaccaagaaaactacaaatcttatactttgtatacaggaaagactgttaaagtatgagatatacccatattgtaatctatttaagaaaacaaaactaaattatgaaaaaataatcaactttgtgatattgccctatgtaaaatttcttctacttcacagtctatatactacagcttctctataaaaaactctctcagctcttcaagatcttacctacaaataaaaatatctctacattcatcattatttttttcctattacctaaaatgaaattattctctggaaattttgctcttaatactctttccttactaatacaagaaggaatgtatcttcttgtaattccagcccagccttttgagaggctgataaaggaggatcgcttgagcccaggagttcaagaccagcctgggcaacatagtgagactccatctctacacaaatttaaaaatttaaccaggcatggtggtgcattcctgctgtcccagctactcaggaggctgaagtgggagaatttcctgggcctgggagattgaggctgcagtgggccatcatggtacaactgcactccagcctgcacaataaagtgagaccctgtgtcaaaaggaaaaaagaaaaagaatagccaccaggcaggctgcaaccctttataagaaataagtctctcctttccaaatttatgaacctcatcattcttcaattgacagaatcctctcaataaacatgctgcacatattttaaaaattcatggaaattgacatttctttttcattccttggtatctatccccttagataccatacttagaaatcagccatgtgtgtctattatgcaattttctgtatttcattgtgttttataggtatttgtgaatttatattgccttactgaaaaatagtaccttcttgaaagctgtctcttgttatatattgggcttgtatctcacatagtgtcacacagaatccttcacatagtggaaatttgccatttgatggcaagagaaacaggaaggcatgaagacccattcattcataccgcccattcaggatcatcttttcatggagaattatctctaggccatttagtgaacaaaacatttcagagctcaatacatttcaaaggcatatacattcaacaactggatcagtattagctgaagacagttttccagagatagtttagaggtaccagttctcagagattctaaaccagtatttctgaggtagagtccagtagactacacttttaaagaactctacatactttttttaagcctgtttcacagcaagattttagaactaatgaatattttacatgacacattttcttaaaatcttggggccttaatattagcatgaaacatgagtaaactatgacttggagtaaataataaaacttgcctaagtttattgaattataactcacatctggagtttggggtcaatactaccttttaccataccacaattgccttccatggaaatacttttttgtttaattatgtgtatcactttctcaggagatattattctagattgtgggttactacatcaagcctatctaacactccccctttctcctaaagttttggtcaaggttttatttgcttgttggtttaattctccactgtggcttacttgagcacacagagagtctgtcttgttttcttcccatccctaatcctaacctgatcctaatccattacctgagaaaaacattcatatgagatcctctttctcctaaggaatcattttgtatatccagctttttctaaccacttagtagtaatttaaccaattctcctggccaacacttgaatcaaagtgataggacaagttaattcacactaacctgctaatgaatataaagaaaatatagcatcattctcccaaaatatataagaattcagtgtgcttataaaaaattgaggaaagtacaatcattgagtgataataattttgcctagaagaggcatttagaaccatttatatttataatgcagctaacattttgactggtgtattaatatcatccagagaaacagaaacacatatacacacacacatatatatacagatgtgtatgtatattacatacacatgtttatatatacacagctgtatatatacatatatacatgtgtgtatgtatatgtatatatataggcacatatagcctattgataattctggagagagaaagagagagagagattttaaggaattagattacaaaattgtgagagctagcaattccaaaatctgaaggataggctagcacgctgaagacccaggtaagagttgatgctgcagtttgagtttgaaggcagttttctgttaaggccttcaactaattggatgaggcctaccaacaaaatggaatgtaatctgctttggaatgtaatggaatgtaattgctcaaactcagctgttttaaatgttaatcttatctaaaaaataccttcataatacatgcagaatcatgtttgaccaaatatctgggtactgatgcctagccaaatgcacacataaaattcaccataatacctggtaatacataaagaaaattcattttacaaatcaaaataatctgagattaaaattaaggcaatgtatccttatggagtgttattgtatctcatcagtcagcttaacgtgaaatgagactactaggacaggactgatgagaaaaccatagcacagagaaataagatttcataataacatttcacaaacagaagttcaggggctgcaggatcagaaacccaattatgtcatcatgttatttttttgtgagatttgaaaagcagctttgtaatttattccagggtaaccataaatctgaatttcatggcaaacttctagcagcagcaaacatgtgcacttgaatgtattctagacaagagaccagagtaaaatgtaataaaaatttcaaagaaactaatatctacttctttgaaaaatgccacaatgcttctaaccttctcttttctctatatcttgtgtatatacgcaagatacctaaaggaacattagtgtgctccttcttcaatcaccttacacaattttattcttgtcttgtttttctttttcacacacaaacacacacacgcacacacaaagtgttttcaaagctcagtatgtatttcctaatgaactgtttcacatgaattatttcacgccttaatcttatcctttcctacactttggcaactgttgagaggttggaaaagactgtattatttattctgaggccaaatataatcatgcttgggtaaaaggtactagatgttcatccactgaacatttattacagcaaattttcataatctataacacttaggatgaacttcaaagcatgtatggggttcttgatatagcttgcttgcttaagtaaaagctatgataaacttaatttatcctgaggatactggaatctgtgagagagtgagagatgttcctagatattatttttggcttaatttttcagtttgtaaatcaatcagaaccactcagcggctctaggactgacagaatagaggtatgggcacagagaagtcttcaggaaacgtacaccttctaacatagctggagctgaggtccaggtccagcactattacagatggaggacgtgtgtctagtctcaagtagggggattggccaaggaaaactgagtcagacaaccaagtcagggtttcaggcacaatggtgttttgggatccttgggggtgttgcttttctggcctaaaacctctttccagtggtgccttttcctgagttttgctcggcccgctgggctcgttccacccactcggcctggcaggctgtgcttggctcaagctactagcctgtatcccatgcctcccaagggtgagttaggcatggagtggcgaggggtgtgtcaacaagcgtgaggtccagcctctacgcagtcagatccttcagctactgcaatgcaggcagcaccaggtgctggcatcggtgccagctctctgcaaggctgcagctggacaggtaccccacaagcagctggcactggggaatgtggtggcacccagaagctctgagatgccaggaaccgcaggacctcaaagagggactaacagccctagttcggagagctcccgggtctgggatcctacaagggctgcagctcttctctccctctcttcacccacaacgaggtgagcaaagggcatgtttcagtcccgtttgtggtacagctcttctagacttgccattcagcaggccctgagttcttgtcctgcaatcagaaagaatgaggcacatagacaagtggaggatgagcaagaagaagagctttattgagcagtagaatagctcagagacctgctgtagatagctcttttctgtagccaggtgtctggacgagtgttcagccctcagcagagtgtagaaagccctgggttaggttgctcccctctgcagacaggtctccctggagtggaagctcctctctgccgctggttgtcccaacactctccagctatcagcagagagagtagctcttagctcctctctgcagctggttatctgcttctctgctctgctctgctctggctaagcccagggcttctatgggcctcagagcggggaagggcatgctgattgttacatgggcagccatgggcaggcccatgtaaaagcaccacgagatccccctcagaactggcagcctgccgccaggcttcagaccttccccggcctaaaggtggggcttcactggggacctgctcccttctgcccatgaacctgccatccttctcctgctgttcaaggcaaccaggctgcctgactttgctcctatctcctggcacaaaaaaagagagaagccagacatcaagaacaggcacctccgaacctgcaaggacaggggccttcctgagcgagagtgcagggaggttttcccaggcctccaagagtgtgaggatgcctgagtctgcagccgctgtttgggcagttgcagctgtgcctgggagtggggcaggactcctgcctgctccacggagcgaggctgtgtatgcagctgtggtttgggcagctgcagcagcacccggggagctaccaccccaactcagaaggggtggggctccagcttgtccatggtcccctggctccacacagtaggcagccccaaccgcacctccctgctccagccgggtgatggcagtggcaggttgtctggagggctgctaccatcacaggaatcaaatgaaagtaaaagtaagccatagtgcttagaacggtttcagacaggacagaagccaaattacaaaaagatggaggcataaggtcaaagatagactgtcatatcttgatttaactaattattgtatgaattgaaaaaatgtatgccctagaagatagcagctgagcctgaagatctgagtaaaataaatcagtaactaggagagaagaaacaagacagtaggaaacaaggggccaagacgtaagttaggtgtggagtacccagtagctctgtcaaagtgggtcagtaactgtgcaggtcactgtagaaaatgttgacttcaacttcctctttaaaatccttctggaatctgtatttaaaaatgaaacaacactatcctaaacattttatgtggatagaaatttgttttcttccccagatatgtttgatttgtgtcttaagttttaatcctttagatattttggtaccaataaacaggagtgcagttactacagtgtattttgtagacaatagaaaacagtgagtatatttttcaaccctaagaaactgtactataaagtttggtgggacttttgtatccaccacatttaaatatacttaataaagatatagtctgacactacaaatgctacgtaacatatatagttcttttttttttgagacggagtctcgctctgttgcccaggctagagtgcagtggcttgatctcagctcactgcaagctccgcctcccgagttcacgccattctcctgcctcagcctccccagtagctgggactacaggtgcccgccaccacgcccagctaaatttttttgtattttttagtagagacggggtttcaccatgttagccaggatggtctcgatctcctgacctcgtgatccacccgcctcggcctcccaaactgctgggattacaggcgtgagctaccgtgcctggccacatatatagttctaaacacaaacacacagagagggagacacacacagacacacagagagagagagacacacacacagacacacacagacgcgcacacacgcacacacacacacacacagatgcagtcatagtgcactacagcttcagactcctggactcaagttaacacactgttttctcatggtgccttcttttcactgcccatccccctttgcaaaatgttcagcaatatactctcagtgacatattttttctataatttcaattccattcaagattaaatatatcagccaggcacagtggctcacgcctgtaatccctgcacttggggaggccaaggtggatggatcacctgaggtcaggagttcgagaccagcctggccaacatgatgaaacccagtctctactaaaaatacaaaaaattagctgggcatggtggcaggcgcctgtaatcccagctactggggagggtgaggcagcagaatgacttgaacccggtaggcagaggttgcagtgagccgagatcgcaccactgcaccccagcctggccaacaagagcaaaactctgtccctgcctcccccccaaaaaagattaaatatatcgctattcataaaattacctcaaatatcaaaacctgtaatacagtaggctttgggcattcagaaggaatcctgagacctctataaaatctcaaattcacaaagcatgtaattttctccctaaaatatggacaagacataacaaagtgccacaaaatcaggtcaagatgtagaagcttggcagattgtgtgcataggccttgagctaattcccagaatctcttacaagagtatcacagtttctcaaattagtgtcttagtaaaattaaaatgaaattctagtgtctttaatcactaattatgaagaatgttatatatctgacctatagacgtttttacgaatttggattttatacaactttttgctaatagatccttccattcttttcaagtaaagcccactatcttcatccaaaaaaaaaggaaagattttctcaggaaacccttgtgtattgttggtaggaacgtaaattggtacagccataatggaaagaagtatggaggtttctcgaaaaattaaaaatagagggccaggcgcagtggctcacgcctgtaatccccacactctgggtggccaaggtgggggaatcacttgagcccaggagttcaagacccacctggccaacatggtgaaaccccatctctactaaaaatacaaaaattggctgggcatggtggtgcttgtctgtaatcccagctacttgggaggctgaggcatgaaaatcgcttgaacccgagaggcgggggttgtagtgagctaagatcatgccagggtactccagcctgggtgagggcaagactccatctcaaaataagaaattaatttttttaattaaaaatagaactactatatgacccagcaaccttcttctgggcatatacccaaagaaaatgaaatcggtacttcataaagatatctgcactcctatgttcatttcagcattattcctgatagccaagatatagaaacaacttaagtatctgtatatgaatggccagataaagatatcatgatacatatacatatgcacatcatataatggaatattattcatcctttaaacaaaagaaggtgatcctaccatttgagacaacatagataacctggagaacattatgctatgtgaaataaaccaggcacatacaaaaaatactgcgtgatctctctcgtgtggaatctaaaaatatggtcaataaacagatatagagagtaggaacagcagttaccagagacaaagtgggttggagataagaaaatataggacaaagggtataaaattgcaattacttaggataactgtatttaggatctaatatacagcatgatgactctacctggtaatagcgtatgctaagagagtaaattttaaatgctcctagccacaaaaaagttaacaatataagatgaacgatatgttaattgtcttgacagtagtagttttaactatgcctatgtatatcaaaacactatgttacacactttaattaataaaatttgcaggacaaaaaagtcctgcaaatgttcctcatgctctttctacttctagttcacaggttccaggataaccagatgactgaggaatgttgaagattgcagtgatggaagtgtctcagtcagcctggaagactgtatggaaggaggttgcctggccacactgtcatgtccccctctccctaaaaaagggacacatttgcctttgtgcaaggcaacacatacatttggtctgtgtatatactttggtctatgtattctgttatttaacattctaataatgttgatgaccttaaaatatgtttgacaatgatccttgtaaatcattattattctgccttctgcaagataagaattatgggccaggtatggcacttaacgcctataatacaaacattttgggaggcccaggcaggaggattgcttgagctcaggagttagagaccagcttgggcaacatagtgagacctcatctctactaaaaataaaacaaaaaaagttatgatagtgacactgcactccagcctgggtgacagagcaagatcctgtatccaaataaataaatgcctaatataggaattatcaaattcaacacatattaattattttcatatccatttgtggaaaataataacgtggggattattcttaaaaaggcttctggaagtggcttcttcaattaaatatattcaaaactgattcccgcttactacgcaaatcaaagaggaattgaaaatgtgtgtgattcccactaaataattttccttttgtatgacttgatgttactatctttgtggagtggctgaggaatgtctccttcttgcctttgtcttcaaaggctctgccaatgtgaagtacaggagagagaggcaagaccagggcccactagcggaaccatctcagccttattccccagaggaaaacacattctttttcactttcctgagctgccttatctgataaaaatgattcttacatttccgagcaatgccttctgattgtaatgtagcttatgccactggtttgcctatttctcaaatataaacatacacacacatacacacatttggccttagcctttctaatttcactctcatcaggacagattgcacacctgtaaacattctcagatcaactccagtaatcaatccacattcatgtaacccctgtagaattaaagatcactggagaccttcaagatcgacttcccatttaaaccataagaaaacaagaccccaatgtgtcagctgcagaaccacaacacggacccgagtcccatgtcttatttgttcagtggtttttctaagtcactgtaaaatttttctacattcctggcctgagaacagaagtaccttttgcttatttattcaattaaattcagtagttggtaaatgtgaataaaggaaatcaaaacactattgaagattatttagatatggctgagaagtggggtgagcacacctgacccactttaacttagagattcaaaatataaacttaactcagctgcagtcaacaacctgacattaaatgcaaacatacaagtaaagaacccaaataaacagaaaaaaactaacctgctacctaccttaaaacactaaatatagagctcctgtcatcctgtttcttactgatttataacttcaaataacaggtcaagaaaaaagctatatatatgaaaagatgagatctgtgtttcaatccaaatctttctttcaataaccctactacttgaaaccatagaaggagacaggaacttcctcccttgtttcttttttctttttcaaaactacccactaatcttttaattaaaagtgaatgatggagagatggcaagtgagcaggagaagctgaggaacacagctcccttatggatttgcacaacgctaatcagtcttcacatcttacagagagatctgtattagttacatggaatctaatctgttctactaaagctgatgctgtcagctgccatgcttagcactcgttcattatgcttgtagacacattttgagaaaacacgtaatctagaagagaaacttctaagaaggttttacatactatatgatgctaatattttagataatattttatgctagtttagtctttgtgtattgaaagaactctgattttcctggaagtccctagacagtacatttaattaatcttacctctcaattcaacaagttgccttttattttagtcataaaatcaatctcttggtaataatatatagtgatatccaggtatgtatgatgcaagcaagtttttagtttaaagctaaggaattaaaatgaaaacaatacatagtgctctctgtacaacaatgactgagaataggtagtgcgtgctctttatatacaaggcactgtgctgagcatatttcgtaagttattgccatgattccatgtaattatgtattataattttacatttgaagaaaataagcctcaaaaacggcaagcagttcacccacccacatttaaaactctgttacgcctctgagatatacagcccatgaattctaccattattcactctgtctctcaactccattctgtcttcatgtacctcccagcccaactgatgtgtcaaggcattggatttaattcattcaccccaaaagtatttatcacatgcttatatgtgcttggctctcttctaggtgcccaagtcacatcagtgaaaaaaataaacaagatcctcatcctcatcaagcttatattcatttcccaacatctgatttcaatttccttgccatgcactcctttcatcatagaagccttacaaaatccccaatccaattgaatctaattctgtgcttcatatttgtcaccctcacttggtaaaactcacaactgtgcttgccggatattaccataaattactaaccatgaacttcaagtggtctattagtgatcagcaccaatgctttaacagttgtctgctcctttgactctttcacgttcctaaaagattttccattttttccctgtctccttcctgtaactcctgtccaattcttatctcacctaatgactttgattcttattatacaaagacaatagtaaaaatcagaagagtacttacaaaaactaccaccatgaaaatcatcactctacctgtatctctcccgactcttgatcatccttcctaccactgtggagaaatttttccgtgcatttttgttctcggtactgctgaagattttttccatgcctctgtccaaggagggcatctcttcactagatcccagttgtatcattctagcatttgccctcattttctcccatatcactggctttccaatttttcccttttaaaaggataattcctataaatttacagctataatagataacagaaaaaagcctctcttgatccaaggtctccttccatttcccaccccatttatctcttttcctttacattaaagtttttccaactgtttccagtttctcccacacaattctctccttaatctagccctgaagtctctcaggcctatgacttcaaaatgagaacctccacccagaccatcattgatctcaaagttgctaagttcaggtcaattcctggtacttgtcttacttgacctctgtggtgcttaaattagctgatccctttccttcttgaaacacattgtccatttatttccaggatgccattttcttgattcttctcatgagattctgctcagatttctttatttgatctttctcaactctcaagcctttgaaatttgggatgcactaaaattcagtccattgatatttccttttaaaaatgcccattgccctactgaacacatccagtctcgtatcatctacacatggatgatttcccaatttatatttccacatttaaacgcctactctaaatatttgcttggctacctaaaaagcatctcaaatgtaaaatgtccatatttgatctccctcatacttccctcttctaataaaattttcaagtcttcttctcaataatggtaaatactctctactgccatatcatcctgaacatgcacaatctcattaacaatggcaaatactttcttccagatgctgatgtggaaaacctaatgttcatccttgattaatatttttctcttacaacatatatctcacccgcccctgtaccacgtgtttcaagccatcatcactttacacctgcattattgcaatatcctcctaagaagctgctcttttttcttcaccacctccaacatcagttcttaacacagcagccaaaatgatcattttaaaataaaagttagatcctctctctctctcagtataaaccctctttctcagagtaaaagccaggtctaacaatgacacctcataattgtccatcttatctcctgacctcatttcttacctctctccttctctagctcttttccttataccctagaatcctcaaacttgatccagactcagaacctctgcctggaacattctactctctgatagctctagaactagaatataaggtaaataacacttgctgatttgaaaaatatactacaaacctaagtggtttaatacaatgtctttttttttttttttgctaacattacagtccagtgagagtacggcagcaatcaagtcaccaagtgacctgaattgcttattatgaactgggtgctttctgacccatctagccatcaagggggccatgcacagcagcattcagcatcaaatcatcaaattaaagtggtatatatgtgatctggcttgagcaggtcctgaagacacaagtaagttacctgagaaagtagctcaaatgtccatggtctccactcctgccaccttgccttctttcccttagcctgcactgatggcctcatggggagttccctatgatcagttgacagaggaagacaagactagggcttggttcacagatggttatgcacgatatgcaggcaccacctgaaagtggacagctgcagctctatagcccctatccctgaaggacagtggtgaaggcaaatcttcccagtgggcagaactttgaagagtataccaggttgtgcactttgtatggaaagagaaatgaccagtagcgccattgtatactgattcatgggctgtagccaatggtttggctggatggtcaggcacttggaagaagcataattggaaaattaatgacaagggaatttggggaaaaggtatgtggatatacctcttggagtggccaaaaactgtgaagatatttgtatccaaagtgagtgctcaccaacgtgtcatctcagcagaagagaattttaataatcgattggatagggtgaccttttctgtggacactactcagtctctttccacagccacagctgtcattgccccatgggcccatgaaaaaggggccatggtggcagggaaggaggttatgcatgagctcagcaacaaggacttccactgccccaagctgacctggctatggccactgctgagtgcccagtttaccagcagcagagatcaacactgagccctcaatatggcaacatttctcggggtgatcaaccagctacctggtggcaggttgattatattggatctcttccctcatgggaagagcagaggtttgtcctcactggaatagacacttattccagttataggtttgcttatcctgcacccaatgcttctgccaaaactaccatccttggactcacagaatgccttatccaccgttatggtgttccacacagcattgcctctgaccaaggcactcacttgcgacagtgggcacatgctcgtgaaattcactggtcttaccatgttgcccattatcttgaagcagctggattgatagaatggtggaacggccttctgaagtcacaattacaatgccaactaggtgacaatattttgcagggctgaggcaaagttctccagaaggctgtgtatgctctgaatcagcatccaacatatggtactatttctctcatagccagaattcatgggtccaggaatcaaggggtggatgtggaagtggcatcacttgccgtcacccctagtggtccactagcaaattttttgcttcctgttaccatgacattacattctgctggcctagatctcttaatttcagagggaggaatgctgctaccaggagacacaacaatgatttcattaaattggaagttaagaatgccacttggacactttgggctcttcctacctttcagccaagagggtaagaagggagttacagtgttggctggggtgattgaactggactatcaagatgaaatctacctactactttacaacagaggtaaagaagagtatgcatggaatacaggagatccattagggcatctcttagtattaccatgctctatgattaaggtcaatgagaaactatgaaagcccaacccaggcaggactacaaatggcccggacccttcaggaatggagatttatgtcactccaccaggaaaaaaacccacgacctgctgaggtgcttgctgaaggcaaagggaatacagaatgggtagtagaaggtagtcatcaataccagctatgaccacgtgatcagttgcagaaacaaggactgtaattgttttaagtatttcctccttttgttaaaaactgtttgtgcatgtatacacttgtactaagaaaatatctccgttttattccttttttcctttatcatgttacataggatttattgacttcataccagcatttaagtattgttaactttatgtaatagcatttgcgttggggattgatgtagttccagttgtaccaatgatagttgtattatgttaggtgtaattctgatcttattattgtctttatttgaagattatgtttgatctcaggcgatgtggatgggttcaaattgacaaaggtggacttgtgatggttaatactgagtgtcaacttgattggattgaaggatgcaaagtattgatcctgggtgtgtttgtgagggtgttgccaaaggagattaacatttgagtcggtgggctgggaaaggcagacccacccttaatctgggtgagcaccatctagtcagcggcccctgtggtcaggatatgaaacaggcagaaaaacatgaaaagtctaggctggcttagcctcccaacctacgtctttctcctgttctggatgcttccttcctttgaacatcagactccaagttctttagctttgggacttggactggcttagtgatggaggacttgcagatggcctattctgggaccttgtgattgtgtgagttaatactacttaataaactcatatatatatatcctattagttctgttcctctagagaaccctgtctaatatgtacaggctctatgcaagtctgaaatctaatagggcagacattaaaccttaaagttccaaaattatctcctttgactccatgtctcacatccaggtcatgctaaagccagaggtgggcacccatggccttgggcagcttcgccccactgcctttgcagggtacatcccccttccctgtctctatcacaggctggcattaagtgtctgtagcttttccaggcatacagtgaaagctgaaggtatatctacaattctggggtctggaagatggtggccttttctcacatctccattaggcagtgccccagtgaggactctgtgtgagagctctgaccccacaattcccttccataccgccgtagcagaagttctccataagggccccatccctgcagcaaacttctgcctggacctccaggtatttccatacatcctctgaaatctaggcaaaggttcccaaacctcagttcttgacttctgggcatccacagggtcaacaccacatggaagctgacaaagacttgggccttgcatgttctgaaatcatggcctgagctgtaccttggccccttttagccatggctgaaacagctgggatacagggtaccaaaaccctaggctgcacacagctggagggccctgatggcccataaaacaattttttttctctcttaggcctccaagcctgtgatggtgggggctaccatgaaggtctctgacatgctctggagacattttccacattgtttggtgattaacattcggctccttgttacttatgtaaatttctgcagcaggcttgaatttatccccagaaaaaaatatatatatgttttcctatcacatcaccaggctgcaaactttccaagcttttgttctctgcttcttcttaaatgttttgcccctaggaaatttcttctgccagataccctaaatcatctttctcaaattcaaagctacacagatatctagggcaggggcaaaatgccaccaatctctttgttaagcatagcaagagtgacctttactccagttcccaagaagttcctcatctccatctgagaccacctcagcctggactttattgtccaaatcactaacagcattttgatcaaagccattcaccaagtctctaggaagtttgaaactttcccacatctttctgtcttatgaacccttcaagtccctaagaagtttcaaactttaccatattttcctgtgtttttgtgagtcctctaaactgttccaacctctgcctgttacctagctccaaagttgcttccacatttttggttatctttacagaagcaccccactcctgataccaacttactacattaatttgttctcatgctgctatgaagaaatacctgaggctggatgacttataaagaaaagaggtttaattgacttacagttctgcatggcttggaggtctcaggaaacttacaatcatggaggaagacacctcttcacagggtggcaggagagaaaaatgagttcaagcaagggaaataccaggtgtttataaacccattagatcttgtgagactcactgattttcatgagaacagcatgggggaaacagcccccatgatcaaaatacctctacctggtcccacccttgacacagggagattattacaattcaaggtgagatttgggtagggacacagagccaaaccatatcagatagataggtggattattcttttgattttcattttgattctgtttctctagtgaattgtgactaataaattgattcaatgtatttaatagatatggacctatttagacgatctaatgactcttgtttgcatttcagaagcttgtgtattttgagaaattgttttattttatctaagttataatattttttatcatagagttattaatattatccctttaatatgcttttaatgtctatagacttgttagtgatgttccaactttcatttctaatattggtaattttttctttggttgtcatgctagcatgcaagtcatgcaagcatccaaaatactacattaaaaataaagacagatgcaaagcacaaaaagagcctaacttactcttataaaactgagaaaaaacaggagaatgttttcacaaaagaaaaatggaagagaatgtagtctttaatttaaaaagacatcaaatataagcaatgtgaataaactcaacagacaattgtaaagttaattgaacagagaaccaaaatgacaatattacgcagataattaaatagaaaccatagaaaacagattagacaatgtggatgataaaattagtaacagaaaaagccatgaagtagtctcagtgaaataaaggggtaaaaaaaagtaatcagaaagaagttaatgttaatggtatacagaaaatgtggatccaaaataaaggtaaatgattcaccagcaaaaaagctcaacaagtaaaattaaaaaacaataatcatataatagaagaaaatatttctaaaatgtaaaataatactcatagacttaaaggcatactgttctcaagaaattcattagaagaaacaattttatgacattctggtaaagtgattgaatttcaaggataaagaaagaattcatcaggtatccaagaacttacaaaggggataaatctggctgggcgcaaatgcctccatggaaaaataaagtgccagaagataatagaacaatatttacaaaattctaagggaacaagtgtgtctcaagaatattataaccaggcaagttgttatccaagtacaaaatggcagtactggcatacttaatcatgcaaaaactcacagaatatgtcattccttattctgtcttagaatgaaactatgtaagagacaaatgaagaaaccattgtaaaagaactgaatggagcgttgttgctgcttcctcagaagggagggaacaccatgtcctcacatgcagaaggtacagaagggaacaaacccacaccctcaaacccatttataagggcctgaatcccttcatcaccttctaaataccccatctcttaatattattacattgtctattcagtctcaacaaaaaatttggggcatacccaatttggtcattgtttggatattagaacacaaaatttaattactcagtttcttactatacataagacactattatcaccacattgattttatttgttatttttattacaattgtaacaaaacctaggagcatctgtatacagaacttaaacacaaacaaagacttttccgattttgtcatttaatctccaaatcttaccgcttaaggtatcttaattacggttatccctaaacatatgcaaatgcagagattggaagagctaagtaactactaagttgtggagctaagactgaattctgggtttcagactacaactttcaaaacatttctgttgcataatgaggtaaaaaatatagtgcctaaattggaaggttaaatgattccttcatagaggaaattcagaaaacaatataaaatagaagaaaacaattcctggttattatggaaattgtattatgtgttgcaaaacaatgacaataaatgtacttaaataaatcaccaacttaataaaccatcttcgattgaatccttagttttctcatgcaaagtctagtattcctacagagccagaacggtgtacaaagaacaagacgggcagataaaattaatgctagcttagttttatatgaagcagcaattgggaatatcaactgttctcatgtttaaatatttgcttttggcaaaatccaaacaagctcactatttgttagattcgtaggtatagagtcaatgtggcagtaggtctggagtggggcacatgtattttgtagattcaaagatgttgtcaattttaaaacattaattttatattaaatttggagagaacaccactttattgaatgcatgccaacattttaagatgtcttccattttcagagcaattttataaaaaggatatactgaagtttattctactacaggcatgaaagttaccacgcaaaccagagatacatttgctctttgtgaagaagcttctgcccatttgtccatttcagtatatcatttaaacaggacagccagtgctgaatagaggcatcagttgaagtcaccatcatggctacacaaattgattccttatgtggggaaaaagaaaaatcctcaaatggcagatggacaattaaatatcttggttcccacgttatttccctggaacctcaagtagatttagtcagacccttggtaattgataaatatgattgaggactttgctctatcttttttacattaaatgagtacattactcagaaacataaataacccattgtagtgatcattgcctacatggggagatttttagcttcaagtaatggatgcacaacccaaagtgaacattttttctatgagagaacacaaagtacagacggagcgtggttccatgattgattcagtagctcagtgacacgatccatgtgctaggtgttttttcatctttgcactctcccagacacagcctatcagccaagtgtaagtccatatttccaaaacagctgcagcctttccaagtcttcgcagggagaaatgatcatgaccacattctctgaaggagaagaagggaacttcctcccctgagtctcattttattgaggaaaaaaaaaaaaaactttttacatgagcagccctcaccctgaagacattcacaattcttatttttcaatagcaattaattttattagtttgacaatttatgatcataaaaaatgcaattcaagaaatgactaaaatatgttaaagaaaatatcagaattattcctggcacttatatctaatatttcaaaacaggctatttcagcaactgatttataaagtgctaatataaaaataatctcaaatatgtttaatttcatccataaactataaattatgaattgctataaatttttggttagcaaaaaaaaccaaaatatttttcctcatgagactgaattatagtgataattaatttcaagagcacttatatagactgaatgttgacacaagaagtagtttttgcatgagcattttgagtattatcttggaattagaagtagttttaagtcactttcccctgtgtattggtttcctgctgcctctgtaacaaattactggaaacttggtggcttaaacaatagaaatttattcttttacagttctcgatgtcataaatctgaaatcagtatcgggggtttgtagggtgtggccatcaggaaagttctaaacagataattcctaatcctttagataatatttctagtggccaccaacattcattggcttgtggtacatcagtctaacctctgcctgtgtgatcacatcccctctccttttctgtctgtgtggtcaaatttctttctgtttccctcttatacagatacatgtgattgtatttagagtccatctggctaatactggataatcttttaggtcaagatctttaacttaatcacatgcaatgattgattttttgtttgtctgatttttcatataaggtaatattcagaggttcaagaaatttagatatgaattttttttctggaacatttttggcctactgcacactcattcacttattcgtttatgcatttaacaaatattatatgaacacctgcaatggatcagacactgttctaatgctggttatataacagcaaagtaaagagacaaaggttttacattcttggagtttacattctagtacaaacattggcaaactgtttctgtaaagggccagatagtaaatattgtttgtagatcatacagtttctctgttgcaactactgaactctcctgttgtagcatagacacagctcctcctctctaaatacaaaaatgaatagctgtggctatattccaataaataattacacatgaaaacaggaagcaagctagatttggctctggggttatagttggccaacactttctctggacagaagacacaggagaaaaagtgacaggcaaatacagaatatgtcagatggtgataagtgatgtggttttaaataaagcacattcagagaaataggacattcaaatgggaaggctataactaactgctataacagataaatcaaaaaattttagtggcttcccaaagagccattttctcagtgtttatgtgaagcccaatactaagatttcttattagtgggaagccttccatgtggtcattcaggaacccaccctcctgctctcttgtatctgccctcctgagaactctagaaccctgtgttcagttggtggttgaagaaagggagtagagaacagcacacaggcattttaaggaagcaggattacaaggtttgatcaattccactcagtttatatgcattttcttctctaaaagctccattgcctgacttcacctaactttaagaaaagcaaaacatgcagttgagctgggtatccaggggcattaaaaaaacaggattaggccgggcgcagtggctcacacctgtaatcccagcactttgggaggccgaggcgggcagatcacttgaggtcaggagtttgagactagcctggccaacatggtgaaaccccgtctctactaaaaatacaaaaattagccaggcatagtgctgggcacctgtaatcccagctacttgggaggctgaggcaggagaatcacttgaacccatgaggtggggcttacagtgagccgagatcgcaccactgcattccagcctgggtgacagagcatgactctgtctcaaaccagcaaacaaacaagcaggattgaagatcactgagcaacatttaatttaggaagtgttgctcttgtaagcagggtagccagaaaaagttttcctggcctttctgaggaaagcagggggctaatgtggcagagatttgcagggggcattctaatatttaggctagctttgtgcttctgaatttatctctttacagatagattagtcatgagactgagcagtagttgttgaaatgtgggaaggaaaaatacaggccatttacaggtcagactcctaaaactcactgtactcttctccttgctttttctttctctctttgggaacaaaatcaaggacttaatctcggcttagaagagagctaaccagaggtgccatagtcaaaagttcagtttccaccaaagcccagtaacaggccacaagctgtctctcaaaaagagagtagttatctgcagaagatggcagggccttgctagaaaattctagaggcccctgctgtgattgacctataggggcctgccaaaggctccaaacagcattcctatctgccactggcacctcaagcacctttgtatctgctgggtcatatggcccaagtggcagagcagcttgcatagcagcctggacctgttgcagagccttctcctgttctggtccccattcaaaactggaaactttttgggtcagtcagtaaatgggcaagaataacacacccaaatgaggaatgtgttgcctccaaaatccaaataggcacaaaaccactaagtgttgtgcctttttcttgcttgtagaaagggccaagtgcggcaacttatcctttaccatagaaggaaggtctcaacatgtccaacaccactagaccactagacccctggaaattttactgaggtagaaggtctctgaattttagtcagatttatttcccatcctctggcatgcaaatgtcttaccaataagtccagtatgttcgctacttcttgctcactgggtccaatcagcataatgtcattaatgtaataaaccagtgtgatatgtttgtggaagtgaaaagtgatcaaggtctctttgaataagattatgatccaaaggcagagagttcacatacccctgaggtagaacagtaaaggtatatttactataaaggtatacttacattgccagctgaaggcaaattgcttccaatggacaagaatagagaaaaaggcatttgccaagttaatggctgcatgcaaggtaccagcagacgtgttaatttgctcaagtaatgaaaccacaactggtagagctgctgcaattggagtcaccatttggttaagcttacaataatccactgtcattctcctagattcatctgtcttccccacaggccaaataggagagttgaacagggatgtagtgggaatcaccacccctgcgtctttcaagtccttaagggtgtcactaatctccgtaatctttccacggatgcaatattatttttgatttatgatttttctagatagaggcagctctaatggcttccatttggcccttcttaccataatatccctcaccctgccagtcaggaagccaatgtgggggttctgccagctgctatgtatgtctatgccaattatgtattctggcactgaagaaataaccacaggatgagtctgggaaccccctggagttgtgtaagtagggcctgagctaaaactctatcaattactacctccataagtccctactttaactggaggaccacagtgacattttgggtctcctggaatcaacgtcagcttagagccagtgtctaatagtccctgaaacgtctaatcatttccctttcatcaatgcacagttgccctggtaacaggtcagaagcctcctcggggaagaatgggagaaagaataacagcataaattgtcagtagtatagtggggttcttgatcaaagggacctggcctcccctttattcaaggggttctggttctggctccaatctggaaattaattgaggggccatggttctctgtttttatcattcaaattagtcttttgtccatttgacctggatgttttctgcctatataaattaagcaggaattcagtaggcttcctatcaatttcatttctaggaacatcacgattagccaataccagagctctacacgagtttgcactatttaattgctgctttgcctctgctgtccattataatagctatgcccaccttgcctttgatggtttagtgctgccacttggcccctgccacctcaggatccaagtattcccattgtatttcaattttgtagttgagtgactgcagttcccactgttagatctgatatacagagaagagcaattacagggctcttcaaagatgcaggtgctgctctcacaagtctatttcacaaaacactggccaagaatatatcttctggacccacccagctcggataggtaggtgtaaagtgactaatctcctccatcatcccaatctttctaagccttttgattctttcctctacattaacccaagggaggaaattaggcatttccagctcgctcacagtaggctatcttttaatccatatttcagccaacaaagcaaataaactatcagaaccattttttaactccccaagctgtaacattaaatgcagagtccctacctagtgggcttaaatcaatacgttcagcctgatccaactctatgttccttccactattatcccatacccttaatatccattcccattcctgttctccatatttatgcttatataaatagaaagctcaagcagttcttttgagtgtagtgcacctcctcataggtcacactctcaacctccccttagggggggccaactgggactttagactagttataggcccagaagcaaacaggggtgttgggggtggctcctgaggagaatcaacattatcttgcctgacgactgcctcaggggaggccatcactgttgccttaggcagcgcagggtttatctcctcagacaaaggtggaaaggctgatggaagcatggactggggaggggatgttgccactactgggcatggagaagctgtttcttctggcaaaaagtgttcatcagagttgacaatctcagtgtgcccaccttcatcagagtcctcccacacattccccttccaagttgcagggtcttattcttttccaattaatgccctcactttaacagtagacacctggtgaggctgtgcatgcacctttcattgcagttcagccactcacataagagcttgtgtctgtttttccacaatttcagctctgtctctacaggagataagactcccactcctgagtggtaatcttagcagatttgatacttagcatctgcttctgaagctgggagttagaatccctgagttcatcattttctttcatccttttgtcaagtgaacttaggagcaaccaaccaacttcattttgttcctttattctccatatatagtcactaaactccttgactctcatgagcagtgaatcaggggtgccaaatgcttttatttttcataactatctaagcagtccatgccaaggactatcagtgttctccatactattagagtagagtccttagcattttggggtctaatcatattaagcagccactctagaaaccctaaaaacaacagaagaactccattattaatagtctgttcctctagaaccactcctgatatgaaaatctgtgttagtcaaggttctctagagagacagaactaataggatatatatatagaaagggagggagtttattatgttgtagtaactcacatgatcacaaggtcccacaataggccatctacaagctgaggagaaaggaagccagtccaagtcccaaagctgaagaacttggagttcgatgttccagggcaggaagcatccagcacaggggaaagatgtaggctaggaggctaagccagtctaggctttttacgtttttctgcctgcttcatatcctggccacactggcagttgatcagactgtgtccacccagattaagtgtgggcttgcctttcgcagcccactgactcaaatgttaatctcctttggcaagacccttacagacccacccaagatcaatactttgcatccttcaatccaatcaagttgagacttaatattaaccattacactgtagcttctttgttttggccagtatcttccacttagaatgtgtatatttacccagtgactatactccattgtatctgggaagtaactaacttgcttttgattttacaggttcataggcagaagggactgccttttctcagatgagactttgtacttggacttttgagttaatgctggaatgagttaaaactttgtgggactgttggaagggcataactgtgttttgaaatgtgaggacattagaattgagagggccatgggtgaaattatatggtttggctctgtgtctctaaccaaatctcaccttgaattgtaataatcccatgtgtcaagggcagaaccaagtagaggtaactgtagcatggaggcagttccctcatgttgttctcatgataatgagtgagtctcatgggatctgatggtcttataacaatttgacatttcccctgcttgcactcaatctgtttcccgcaaccctgtgaagaggtgccttttgccatgcttgtaaatttccggaggcctttccagccatgtggaactgtgagtcaattaaacctcttttctttataaattacctagtctcaggtatttctctacagcagcctaagaacaaactaatatctatctatctatctatgatctggctatagctatatatatattatatatataatatatattatgatttttatatatatatgatttattatgaggtataggcttatggaattataaagtctgagaaatcccatctgtgcaagatggagacattggacagtcagtggtgtagttcaaaagcctgaaagccagagagccaatggtatagatttcagtctgagtttgaaagcttgagaaacagaaggaccaagggcaagaaaagattgatatctcagttcaagtaggcagaaagagaatgaatcctctctctttcatctttttgctctattcaattatcaagggactaaatgttacccacccacaatggggaagccaactcagttcattcagtctactgattaaaatgctaatctcttctataaacactcccatggacacacccagaaataatgtttaatcagctatctgggcatcctgtgatccagtcaagttaacaaaattaactttcacaaatactctaattgtcaatgtggcacttatattcctctccttacatacttaaatactatgatataaagccaatatatcttatgttacatgataagagaataggagacagaagaaaaccacagtattatatacacaatatatacacaaccaaaaatgcatttataaaaaaatggggagatcatatttattacaatcaaaattatcattgctgtaactggtcatgtagtcatagctagtatttataactactttattcaagtatccattctgtattccctttgtcttcaggaagcacctcagctggtagtgtttttttgtcttttgtggttacccaattttttattcctgaagggctgtgatcactaacaaccttgtcttcattgggctgttgtttcctattaaccttaatcacagggcatggtaatactaagcaaaactataagggatcacccacactctagatgtattttaccttacctacattatggactagcagtccaatttccccttggtagtcaggatcaatcaccccagatagtactttaactcccttctttgcctattgattgagaagcatgaggagttcaaagcggccaggtgagtcttagcttccatttcaatggaatcattattgtatctcctaatggaaggactcctccctttgcaactaagacctccagcccagcacagcacagggtttgggaaaagaaaataaatattttgctagtgagtcattagtggtagtagtgagggttttcactcccatttctgctccttaattcctagaaccatgaatgctggctgtaggagaaacaggatcatatatccgatgctgatacagaacatacacagccttctagaaaccctttccccattctctctcaacaaatgttcttgctttagcaagaacacgctgaaagacttggagtttaatttccgttataattcagccattcataggatgagattctgcatctcactttctgcaatctcaactctgtggacaccaaaaataagagttatcttcagatgacaataagtcctcaggtcacttatgcttctgggaatttaaatcctaagttcatccttttctttcaccactttgtccagtgacattaggagcaaatggccaaccttattatatttgttagttttccaaaactgttcaaaagcatcatctacacagtcattcagttccttgctttttataagtggtatccaaggcagatattttgtatatctctattaccagattatgtcatggatgttagtgctctctttactactggaaacagagtcatccaaacctttacatctaatcagattagacaatttattccaaaatctacagcatcaatctgggaaacttatttataaaattctatttctgtaaaaccactcccagtaccaatatatgtcttagtcagggttatccagagaaataaaatcaataaaatctatcctctgaaacctggagacccagttggtgtaatctgaaggcctgaaagtcaaagattcaatggtgtaattttagtcccagtttgtaggcctggcatttcaaagaaaggagaggaatagatattccagctcaatcaatcaggcaaagaaagagtgaattctcctgtccttcaccttttcttctattcagaccctcactgaattagttgatatcacacatagagaagggcaatgaagtttactatgtctattcataaaaatgctaatttctcccatgaataccatgacagagacactcagaaatattgtctaaatagatgtcctgatcccatgatctaggaaagttaacacataaaatatgacaatcaataactaataacttttcaaatgaaaaaccacaatatttgaatggtttcactgctgaattacaccaattgtttaagaagaaactgtaaaattttccacaatccctgtcaggaagtagaaaaaaatgagaatgtttcctaacattttttatgaagacagtgttactctaatactaaatatagataaagcccttacagaaaagaaaactaaagattatgaacacaggtgaaaatttcacatgaatacagattcaaaatttttcaataaaatattaacaaatcaaacaacaacatataaaaataattctacaccatgatcaagaaggaattactccaggtatgcaagactgttctacatccagaagtcagtgttatctaccacattaaagactaataaagaagaaaattgaataattatatcaatagatacagaaaaagcatttgaaaatacatgaaacctattcataataagaagtattagcaaattagaagtagagaggatgggaactccctgtatttgatgaagacacctacaaaaatcctacaggtggaatcatatttaatgttgagagactggaagcttttctcctaagactgggaacaaggcaaagataacttctctcatcatttctactcaacattgtactaaaagtcttaacaagtgcaataagacaataaaagaaataaaaaagatagaaaaggaaaaattagaactatctgtgctgagtttatattattatctatataacagatctcaaggaatttgcaaaaacaagtagttttttaaatctaattataagatctcagaaaacaaggtcaatatacaaaagttagttacttattaagaaattcatcctttgcagtgagcaatgagaaacaatattagtttctaaaaatgccatttacaattgcacagacatgaaaataaatactgagatataaatctgacaaaactttttaataatctacatgtcttttactacatgtgcaaaactacaaaattctgataaaagaaattacagaagatctaaataaagtgtgataagttcaacattacttcactattgttaagatgttaattctttcctatttgatgaatatattcaatgcaatcccaattttttagaaaaatactcctttttagatatcaacaaacatatatataatgtttatatgaaaagccaaaaaacctgaaatactcaataaaaactgaaaaaacataaagttggaggatgcatgctacccgattttaagacttactataaaggcacagtgtcaagacagtgtggtattgactaaagaattcacacatagttcaatggaactagtgggtccagaaataggcctcatacaaatataatcaactgatctttgacaaaggagcaaaatgcaattcaatagcaaaggaatagtctttgcaataaatgtagtgagtggtgctgcaacaatgggctatccttctgcacacacataaaaaaatgaacctggagacacgaacctcagagcttcacaaaaaatcaacttagaatagaacatagatttaaatgcaaaactacaaatataggagagaatttagaagaccttgaatttggccataagattttggatacaaccacaaaacgattctgtgaaagcttagatgttactaaaattaaaagcttcagccctgtgaaagtcactgttaggataatttttaaaaagtaatagactgggaaaaaatttgcaagacatgcatctgataaaaggcttgtatccaaaatatacaataaacatttaagactcaactataagaaaaccacatttgaaagttggcaaaagatttaaatagacacctcatcaaagaagatacacagatagaaaataaagatggtcaacatcatttgttaccagaacattgcaaattaaaacaattaggaaccactacttatttattagaattgctaaaatctaaaaatctgataatacttaatactgagaagaatgcagagtaacaggaactctcattcttttctggtggaaatgaaaaactgtacagattccttggaagacaacttttcaatttctttttttttttttttttttttttctgggacggaatctcactctgtcgcccagtctggagtacagtggcacaatcttagctcactgcaaactctgcctcccgggttcatgccattctcctgcctcagcctcctgagcttttcaatttcttatcaagctaaacatataattcagcaagcatgctcctagatttttactaaactgatttgttaatttttgcccacaaaaattctatttatatttttatagatgctttattcataattaccccaaactggaagcaatcaagacgttccccaagaggagaacagatagtctgtgatacatccatatggtgagataatattcaatgataaaaagataagagcaatcaaatcatgaaaaaaatgaaagaatcttaaatgcaaatttctaagtgaaataagccaatttgaaaaggatacagactagtgattctgattatgtgacattccacaagaaagaaacctatcaggggttgccaaatgtttgtggggagtaaaggaggatggaagaataattgatgcacaaatgattcttctgtcaataaagctatgattatatgctgtatgatactgtaatggtggatacatggcattaggtatttgtcaaaaccaacagaactttacagaagaaatagtaaaccttaatgtacgcaaatttaaaaagaaacatatagtatgtctggagatccctgacaccatctaagcaaaaaaaaaatctaactgtatttcacatgtgtgacacaacctcactgaagttggtagaggaagaaaatgtgctaacctaagttactttatatacgatataaatgaattttatttgtctcatgaaccctgtactttagttgacaaaaatgtttttgttaagaggtaacttaggttacaagtgctctgctgaatgaattgattaatgccattatcttgagagtaggttagctacctaggaagtgagttcttgataaaaggattagttcagcactattcctatttctctgtcacatgcatacatgctgtcttgctcttctgccttccaccatgggataacacagaaggaaggtccttgttacatgtaggttcctcaaccttggatttcccagtctcgagaactgtaagaaataagtctctgttctttataaattacccagtctaaggcatgctacattagcacaaaacggactaagacactatctatccatctacctatatgtctatatatctacctaatctatctggctatttatctatctatctatctatctatctatctatctatctatcatctatctgttcccacctaagcaggtgaaagtaagctaccttataaagcagaagataatatacacatcaaaacactctcttacctaataaagactggtacgttaaaggtagtggtacactgcttttacatctcaatgtttatttgctcatttgtttttcccaactgtgaacaaaatgttatgaaaaagctattataatagcaactagtatgcagctccaccatctttaacttaattggagagagacataaagaaaaatgtttgttcttaacattcttgcaagaagaagcaatatgcagagaatgtttttttctctctctctctttctctgtgtttatgtatacattcattaatctatacttatatacattaaaattcagttttttaaaataagtaagaaaatgggtgtttcagtcaactaaatattctaattaattcaatattttatcctgtgagatgttcaaaagatcaaatatttttaaaagtcataataatcccataaaattacttagatagtcactctttcttcctcatcttttgtctaggtcactcctaccatactgaacatgaatttgataattttttaatcttattcacgcacaagcttagatttgattccttattttatatttataaactatttttgtcttgccgctgacttttttgtatcagattgagttttatactactgttttatttaagccctttcttgcaattaccatcatcctgcaccaatatagaaatttcagtgtgtttccttcttccttgagctcacaatgagatctcctgttataggctgatggctacaggcatattttactgtcataattttcacagaactcacacactaataatccaaactaaccctaaaattatatcaaaaaattaatctgattaggatgataattcacagtcacatagtgttttggaatctttgtggtgaaaataaattgttcgtttaaaactattgacttagaagtcggactctattattgtgtaatgactgaaaccagaagtaacatttttcaatatatctctatataaagaatattctctgatatggtttggctgtgtccccacccaaatctcatcttaaattgtaactcccacaattcccacatgtcctgggaggaaccgggtgggaggtgattgaattatgggggtggatctttcctacgctgttctcatgacagtgaatgagtctcatgagatttgatagttttaaaaatgtaagtttctctgcacaagctctctttttgcctgctgccatccacgtaagatgtgacttgcacctccttgtcttctgccacgattgtgaggcttccccagccatgtggaactgtgagttctccattatacctctttcctttttatattgcccagtcttcagtatgtctttatcagcagcatgagactagactaacacattctcattttgtgcgttttggagaaaaaataatacggcaagaaattccatttttgaaaattattattgcttaaactttagataaatgggaattgactgtgtttgtttaccctaacatggactaggtgctggcaaattacaactgcaattttgtttctgcagcctcaaatttaatcttttattttgtcagatgtggctaggtgaacaatttccaaaaaaaaaaaagactaaaatagtgagccttaaaaaatcctatttctcttctagacttggatccctaagtaccagtcaaggaaaatatctaatttcttcaaggaaaaagagtccatatttcttttgaaacatatcatgttgccatagttaccaaatgctctccttttatttcctaacaataatatcaccatctagatacacatagcttacaaaagtaaatgttttattgtggaattttataaggacacaggatctgcttccaatgactttcaaaaaaattaaaatggaaggattctttctaataaatacacctgagttgaaattaaatgttttctgagcaagagcataggagaaaaggaggagcagagagaaactgaaaaagacacatacagttttaacatttcaaaggtgaaggtgatttaaattaggatttgggcatggctgttcttctccaccccagtgtatataaacattctcatatgggttgccatgtctccaggagtgataccttcatctggacaggccattagaaattaaaacatatttacacatatacacatgcacatcttagaataagaaaaattataaaccagcttatttttatttgtcttgccaaatataaactttagagacaaaattttaaataaagcagcaactatgaaaataaataatgagattcctgtgtacagaattacgtagttggggtttacatatttgaaatcaagctccaagtagaaacgaatcagttttctctttcttttctcttactttttaagaagctatcacaagaattttatttacaggaatttaaggtggaaacatataccttttggggagtaaatcattactaaaaacataattaatgtggtcattttgaacaatattatcaaatagttacctcaatgaatcataaaaatcatcaaatatgtacatgatttgaaaaatcttgaaaactaagaaagttgaaatatgcaaaaagtaaatttcatagtctacctttatagataaaacatcaatagctaatattaaactataagcattattattaaaatataaacattaattgaaaatttaaaattaaatttaaaaattaattaatttctttatatcttcctatttcatacttaaaaggtttcttattctagcctacacggtgtatcacaaactgcaaattacaatacttgatgttttaatgcactatgtcggggggtggggggcaaggggagagaggaagagcattaggacaaatacctaatgcatgcgaggcttaaaacctacatgacagtttgttaggttcagcaaaccaccacggcacatgtatacctatgtaacaaacctgcatgttctgcacacatatcccagaacttaaagtaaaatttaaaataagaaaataataataataaagaatgtgttatttaaatgtaatctttagcatttcagttttgtttactggagtaataatctcaatattatttttaaatatagagaattcaaaattatttaacataaagtatacttcattttatttgtaaagttttacccatcatttttaaaatgaatgatttaggcagagcattacggcgtttgagaaaaactggccttcattgtaagttgactgtaggatttattgatacaagcaaaagatgcataaaaaagaaaactttttcataattttgtttttcaaaaacttatatatgcatatgtgtatgtgtgtatgtatgtgtgtatatttaaatatgtatcatgtactttagagagatttttacatctagtatggctcttaggataaaggccatgattcccatagtataagttttctcgattaaaaaactagctttgtgtggtggtgggtgagatgttatattgtttacttcttcaaactctgttggcctgccttaaacttattttggtttattattgtttgtatttttaattgtatgcttagagggatcctttatctttccaatcagccttgtccacgtctgaatcccatctcctttcaccttgagaatttttattctcaagaggtcaatttttttttctgtcttcttactctcatttcccactacaggaggcttatctaattataaacaataaagaaatgattttgaaattatctttttacttatacacccaaacaggtatctgtagattctttcttatcttttgcttacccatttctgaaatgttcctatacctaaagccagatgcttttttttttttttaatctgctgcagtctttttggacaacttagtcctcttccagtcgcttcacctctcactcataacttgctgactccagaatctataactctttaattatcttctgaggtcctgagatatatatatatatatatatatatatatatatatatatatatatatatatatatataaaatataaaatatatatatacacaatgttttattgaaacttcccaattattgcatgtcaggtattctcatttcacagaccagcaaacagatacttacagaagttaagtattacagcaggtttactcaattagcacatgtccaagctagtatttaatccaaaacttttgattttttttctattatacacgctttctttccattttcttgaattccagttttgtctaccagggtaaagtaggtgattgttaaagaagggaggctttagaatttctatcttttttattttttatttttttggaacccacttgcatgaatttttcagattccggaaataatgctttgcaatgaatgaggtagtacttttaattctatatatttttgccataatgtctatgcacccagactgtgaaataaattgcactgacctgtgtctttaatgcctgtcacttaaaatttttccaaaccaccttaaatgttgaagttcataaaattggtaatgctcgacgtggggggaaaaaaaacaacagaaaccactaagatgttctactttatggtctctgcatgacatctagtggttggaactggaaaatttgaggaaattatgatttgtaccagggaaaatacaatctgtgttagtctggagtcctcattcctaacatcaaaggaaacatgatgtagatatcctttacttccaaagaggttggccaccggagggtaggcctttcttaatcatttctgtttctcagtctgtgtatcagggaataacaatttctctctgtgttaagcaatccgtgctcactggggcttgtgaaacattggtctgtaatgagtacctacttttgatggatatgagttggataattataagattcaaaagtaaataaaccctttggttttctttctttatatgcaagtattaatgatactaaatctatgaccctattattcaaaactgtatttaggaaaactttttgtatactccagttttgattcttctaaagaggttataaaatcaagtaactgcttagctttgagtcttaggataatattgggtgtaggtccttgataatccaagatttaggatctgcctaccagaaattttagtcagcttagataactgacaatggaaaatagtacatgatatgttctaaataaatgacaagccaatatcgtagggatgccgcaaaggatttggagtccaagaggtcagagaagggatcacgaaggaggatggatttgaactgagctacagttgatagatgggcagcttaaggtattgttaagcaaacaggcaacagagtgagattcctgggtgttggctttccttcagtgtgaccttggacaaactatctaattgctccacattttactttcttcatttgcatcacagtacgtacatacatagacacatagcatctatttcttgtggtgaagatcagtataatgtctcggttggcaaattatcagttctttttattataaataaattaaaaatgcaaatgtttaggtcaagtgttattctctgaaaatgcacaaagagaaatgagccaagagaaaaataactaataacaaataaatatatttctgacaccaagacaagtccaagagaatttaaaaagtaattataaatattttatggtaatgtatttcaaatatacatgctgcagattccacgatttatgtcatggggatggatcaggagtccttgaaacctggcacttattaataaatgttgtttctaattttctatcactgcaaggtactcttatagacaccatgtgaacaaatcaaatgttacatctctgggattataggctcataaaaaatcaacacctagggcataacttgaatcacagtaacttcatgcatttcaaatgggataaagtcagccaagaagtgtttaggtttgcagtcgattgctcaagattatggtatcaaccaactctggaattaacttctgggatgaagagtaagaagaaagtaaaatcactccacataggctcaaaggagacttttgttgaagtgggtttccccatggtctttgaagtgggtgaggcctagtgcttgttaaatccaggggccttgtgatgaatgaagtataagagagattgctgacagatttgaaatcccacagtagttgttttgtcctttgctttgagaaggttggtgataattaaactgcttttccagcagagtctttgttcctaacccaagtatcgtatttaaagaagagccaagtagtacaggcattttttgatgatgacactaatctgactctgacctatcttcttccatgtttatttcccaaaacatacacattggtagttgaagttatttcctatgaagtgaccaagtgacttggggcctgtgtgtgtgtgtgtgtgtgtgtgtgtgtgtgtgtgtgcatatgtttatggatgtgcttcaagaaggctcaaccttcaccttctcaggatcatttagtttcaatgtcatctttgcctctttgttatttatcagcaggagatagctgaccaagctcagtgctgaactcaagcaacgctggcatgtctacccttgatgtttaacagacctgaactaaacaaagcatattcagtttgagtcattttaaatatttggtcactttttaactccatgtaaaccttctggttaaaccttatttcaaatagtaaaagaatcatagcttgaatatagtgcctgacttatgacagtttctcaataaatagttttgatttataatcctaaaagtaggagtacatttgctgctggaggacaaatagacttaaaaataatatgtaatataactttacatctgaaataaataataacactatcatagagtttaactcttcgttgcctgcctttttagcttccttatccttttaatttctgcttctttttttgtttcttatttttcttgtaaataggtaggatcagatatataaatatccagcacgggctacgtgctggagatgtaatcagcattttgagtgtcctaactactcaaaacacgcttttaacacatgagtagaatttgatattttaaacagattcagtactttattttcgtatgttgataacatgtaaaaaatctatgtattgccagtttctttttttatctgctcccctttttctattgtatttgtattgaaatgttaattttaacacataatatgtatataaattttagatccctaacatttttaatagtatgtactttttgatcataccacaactagagtttcatagcaaagttccctgttttattaaaatccaccaggggatgttttcaacttgtgaaataacttaactgcaataaacctgggctgagctagtgcttatgattagcatgttggcaatgatcaactgattagggatatattgacatgtcaaaaaacgtgatgagggaagaaaggaaattgctgcttctcagtgtttgtaagtgccaaaacagatatgtattttatattgtgagaaaagggttgatgtgaatttgtctaaagagcaggatgtgaaaagtattgtttctataagaaaaaatcatcctggattcaccagtatgcagagaaagcaactttattctttttttctctgtctcactaaataaaatctctagcagaacataccactcctgataattacatgctcagcgattgatgttttcacatttcaaatggtcctactcattcagtaccaatacatagtccaatccatcataaaaagtccaaatgacaaacatgtatctgtttaacgtttcttttctcccctaacttgggctcactccagtgttaggagcctgtagtggagggagaaatgtgatggctttgtttccttctccttaccttactttctcttctgctaccttgcctaacagatagggcccaggtaagctgatatttggagtagtgaatacaggcttacgcgtatggtacaccagagatggtgttggtactctctggacttggtgaatgaatgttgaaagtggaattgtcttccagtaggatgatagtgaaggttactcttagactctttctggggtcctttggccactattttttgaagtgagccattggacttcaccttgtctcttgctcttgctgcagctgcgttttctctcttgatggtagtcttgatcaagatccttttacaataacacaagcctagcatgttcttaaatctagtccttgagaaatccatgcttttgctttgtcattgtaaaacacatagatcgctgtatccttgttcagtaagctacaacatactcgtatctcctgaaatcctgggcttaaatcgaggtctcaaaggctttgttttgttttgttgtatggttgtatgggtgagtgtgtgtgtgtgtgtgtgtgtgtgtgtttattctcctgaaattctcctcctcacttgacttaagctaaaagataaacgtcctcttcctttcagccacagatggtgatggataaattgaatgtcattcacattattcccttaaaataaactctctccctcccctctcccgtctcatccttgtccctttctttatataatgggtaatgcgttaatgtcagcagaatagttttggggccataatggcaagtatcacgtggatggtttagcattgtttttagaatgctgtgaatttgggtatatgtgagttttggggaaagttttgcaactatatgtttgttaattaaatgaggactataaagtaatataaaattatgtttctggaacatattttggaagctataaagtcatctgtatttattatccacagacataatgtcattgttcaggtcctgcaaccttcttataatcaacatacgtgggcccagggattttatgtatcttcgccttcctagtttccgtggacaatcattcctcatacaaaaagaaggaattacccatgatttaagatcttttcaaagtgatccccaataatgacatctgcattattttagcttggaaatatcaaagcaacaaagatacagacctctgcacagttggctgcatgttttgaaagataatgttccacaggctagtaatacatctctacaggctgaattatggagaggaggtgaggaaaatgaaatgaaaccgagaagataagtagaaaagttaaaaaaaaaaagtagtaaatttcataagtcagacgcaaatgctaaagagcttgagtttcttataagaaatagcactggagcaacaacaggagggaaaatatgtaccttatgtgcaaaaatatcttcttcctggatttcagaaactaataaaattttagtagattttaaatgcaaaatcttattaccaagtgtgttttcaataacacccattattattaaaattttatataaaagtgaaaaatgccagctattgaaatgtaagcataatgtttttaaattaaaatctgtaattcttccacctaaggtgctgttttacaatgccttcttttttctttcaaaatctgtctcactcaataactggcttatttctaagacactaaacacaatgataaggagagaataattgttctatgcctgattttctttgaaaagtatgatgaatttcaacagaagctattgtaaaattgactgatatgtttgaggatattgaagtatatgtaatactttaatatgaattattttgacgtgtcacttactggtagttattcaagcctggcattttctgctctcaaataaaattgaggcatatggattaatttgaattgcagctaatgtgtaattcgtaaagaaactgttctgactcaaaagccaattaatgcatttgccttacatatataacgaactattgaaagacaaatgcagcactcttcattacgttttaatagattctaaattcccaacatacactaaggttagaattttctcaaaatagtgattctcagtataaatgttacatattgtttcactgtgctttgcattaatatttctaaatccttaaaagcaaaggcaaattagcagtagtataggatttagggccttagatatttaagttttcccatacttagattgaaagaagtaatatattttttaacaatgcaaattatttttatcattttagactatgtcttagatttttatacatattagtatgtcaacatataatttaaaagatattctaaggtaggaaaattgtacaggcaaggctagaagaaatgtataatagttaatgtggtcccttagggctaaaaaaatcaaaaagccattggcacccatgggcctaaagggacaaagagagagactgattagtagcacacatagaaaatagccatagtcagagctgcttgacaggggctgcaacattcagtggatgaatgtggagaataagtggtaactcagcagagagagcaagggggagaaatgttcaaacttattgtctatttgcagaagacattgtcttatatattgatatggtttgcctgtgtctccaccaaaatctcatcttgaattgtagctcccataattcccacatgttgtgggaggaaccccagtgggagataattgaatcatgagggcagtttcctccacactgttttcatggtattgaataagtctcacgagatctgatggttttataaggggaaacccctttcccttggctctcattccctctttgcctgctgccatgtgagatgtgcctttcaccttctgccatgattgtgaggccttcccatccacgtggaactgtgagtccactgaatctctttttctttgtaaattacccagtctcaggtatatctttatcagcagcatgaaaacgaactaatatagtaaattggtaccgaggtagtggggcactgctataaagatactctaaaacgtgggagcaactttggaactgggtaacaggcagaagctgaaacagtttgaagggctcagaagaagacaggaagatgtgagaaattttggaacttcctagagacttgttgaatggctttgacctaaatgctgacaatgatatgggcaatgaaatccaggtggaagtggtctcaggtggagatgaggaacttgttggaaaccggaataaaggtgactcttgctatgtttttttttgtttgtttgtttgtttttgagtactcaggctggagtgcaatggcgcgatctcagctcactgcaagctccgcctcccgggttcacgccattctcctgcctcagcctcccgagtagctgggattacaggcacccgccaccacgcctggctaattttttgtatttttagtagagacgggctttcaccatgttagccaggatggtctcaatctcctgaccttgtgatccgcctgccttggcctcccaaagtgctgggattacaggcgtgagtcaccgcgcccggccggactcttgctatgttttagcaaagagactggtggcatttcgcccttgccctagagatttgtggaattgtgaacttaagggagatgatgtaaggtatgtagcagaacaaatttctaagcagcaaagcattcaagaggtgactgggtgctgttaaaagcattcagttttaaaaggaaaacagagaaaagttcagaaaatttgcagcctgaggtgatagaaaagaaaaacccagtttctgaggagaaattcaagctggctgcggaaatttgcataagtaacaaagagccaaatattaatagccaaaacaatggggaaaatgtctccagggcacatcagagacctttgtggcagcccctcccatcacaggcccagagattcaggagaaaaaaaatggtttcgtgggctggacccagggcccccttgctgtgtgcagcctagggacttggtgccctgcatcctagccgctctagccatggctaagaggggccaaggtacagcttcggccatggcttcagagggtccaagcccaaacccttggcagcttccatgtggcgttgagcctgcaggtatacagaagtgaagaattgaggtgtgggaagctctgcctagatttcagaagatgtatggaaatgcctggatgtccaggtagaagtttgctacaggggcagggtcctcatggagaacctctgctacggcagtgtgggagggaaatgtggggttggagcccccacacagtgtcctcactggggcattgcctagccggggagcctacttcttgcatcagtgtaatctggatgtgagacatggagtcaaaggagatcattctggagctttaagatttgactacacttctggattttggacttgcatgggtttttttatcccccgtttttgggccagtttctcccatttggaatggctgtatttatccaatgcctgtacccccattttatctaggaagtaaccccactaatttggttttgattttacaggctcataggcagaagggacttggcttgtctcagatgagactttgaactatggacttttaagttattgctgaaatgagttaagactttgagggactgttgggaaggcatgattgtttttgaaatgtgaggatatgagatttgggagggtccaggggcgcaatgatatggtttgtctgtgtccccacccaaatctcatcttgaactgtagctcccataattcgcacgtgttgtgggagggacccagtgggagataattgaatcatggggggcagtttcctccatatcgttctcatggtagtgagtaagtctaacaagatctgatggttttataaggggaaaccccttccacttggttctcattccctctttgcctgccaccatgtgggatgtgtcttttgccttccaccataattatgaggtcttcctaaccacatggaactgtgagtccattgaacctcttttctttgtaaattacccattcgtaggtatgtctttatcagcagcatgaaaacagactaatatatatatagattatactaatggatctacaaatgttattaaaactaagaaattagttcaacaagattgcaggatacaagatcaatatgtccatgaactaaggcatttgcattattaagaaaatattagtatttagaatgtattagtactttccaattttatttacatatttgaagtaatccctgtcaaaacctcagatggtttctttacagaaattgacaagctaatccttaattttatatgaaaatttaagggatccagaatcgtcaaaatgatctggaaaaagaacaaatttggtagaatcactattcctgatttcaaaacttaccacaacactacaataattagacaatgctatacttatataatggcatatatttgagaatccagatataaaacttcacatttatggtcaattaattttcaacataggtgctgcaacaattcaacaggggaaagaatagtgttttcagtaaggctgggacaactgaaaatccatgtgcaaaagaacaaaattggacaactgttttacactgtacacaaaaattaactcaatatagatcagagacttaaatgtaacagctaatcctatagcattacaagaggaaatgggtgcacaatttttgtgatctagaattgggcagttgctgctattctcaccccagaataacttaacacccacaaattattctaaaatgtgagtatttttaacaacaaaaagctctgctttgctctatcaacaaatgtcacttatgtttgtaatttgtgacacttattcatataatccagtagctatatattttgaacatgtttaatattagtacatttagttatgataattctgaaaactatttcagatataataaggatagaggtattcattgctattgtgcggttgactttctttttgtcttgtttcaacaactgcatacgtaaagcctttaaagaaatttattaatgaatgttgtgaacttagtaagaaatcagaaaagttaacaaattatctattaaaatggtcctgttatctaagttggagtacattccttcattatgaaggcttttaagtgctatcattttaaacttatttacatgacctcttcttccttttcggtgacagctaaaatccacttaaatttaatatccacttgtgactctttctgaatccactggaagagctccacatcattttctgtaccagcgaacaagatgaacaagctgcatctgatccatgaaactcaatttctggggcacatgcccccacccagcccatgagcaaagacagggtcttgaaattgatcaatgacactggaaagagaaacattctctttctcaaattggttatgctgtttcttttttccccttctatcaatgaattattcatttttcagaggtcatttctgctagttccatttctacacatttgcatgcacatacacaaatttattatataattttcctcttaaagattacttaggttcttgctgtgttttgctatcagtgaataatactttgattcacacacagaagttcatgttttcacacatgtttaagaatccttatagaataacatgctagaagtataaatttgggggcaaagaacaaatctgacattaattttaatgagtaatgctaaattatcccttttcaaggagaagctttaacaatctacaattccacaataacttcaaagagtgtgaatttttctatggcctagacaatactgagtattaggtctttcagtgttgtcaatctaatgaataaaaaaagttataatgttgcattaattttcatgagtgtttgatttggaatatttttacatatttgataggtcattcatttattttcttcaaacattttatctctttttgttttgcgttatttgagtattttttatatactggtgatgttgatatattatctcacatattttacaaagcttttagctctgtatgtctttctgacatttagtaagacattaatatatgtatttataaagctatttttccggtgtatgttatggattttacattgttctaagattatttcagtttattatctttaattatcttgaagtgtattaaaatttcttgaattttctatattagtagttctcatattttagggtgcataggaattacccaggatgcttgttacagcacaaatcactgggttcagcaggtctgtgatagagcgcctgagacaatgcatttctttttttttttttttgagacggagtctcgctctgtcacccaggctggagtgcagtggtgcgatctcggcccactgcaagctctgcctcccaggttcacgccattctcccgcctcagcctcccgagtagctgggattacaggtgcccgccaccacgcccggctaatatttttttgcatttttagtacagacggggtttcactgtgttagccaggatggtctcgatctcctgaccttgtgatctgcccacctcagcctcccaaagtgctgggaatacaggcgtgagccaccggacaatgcatttctaataagtctagaacctgcagctgctgctggtttagggccacactttgaaaactatattttcgtataataattatttaatatacaaatattgagtgttatcttcagagttaggtaggattatagtattttatagaaaaatataaaggaatgatagcagtatgcatgttttattattcattataataaaaatttttctactattttattatgtattattgcagtagggctccaatggtgtgaatctttctcctttgctaagtataataaaatgtttgtttttgtctctcttaagtatgtttatagtaggtttctacctgtggcttatagtaatagagttaaaatttcttattttttagtttaagggtttttttaattggcaatgaatacaacattttatcaaattattttgacatttaataatatgattgccttattttttcagtcttttcatgcgatgaattatatcaatagatttaataatgttgagacatacttgtataatggaagttatcttagttgtgatactcagtattattctggtatttaatttatatttgattctgtttagttcaaaactgtagtctgagatgttactttgcaagatcaaaaattagtatgcgagagctatatatgtacatatatacatacatatatatacatatatatatatatatatacacacacacataattacaagtattctgattggggaaacgattattttctcacagaggaacttgtgctagttccccatgatactacaagatgtcatgcagcaagcttcacaccacaggagaggaggctccaagttatgaaaatagcacctgtgcaggagctactagcaaaactgcccatgctccctgagagagaaagaaacctttgttccagaatctaaacaagttgtttctcagagtcaagacatgtgtcactgctttactaccctgaaatacaaacaaatggatacggggagatatatctctatatttctctggaagcatctgtctctgacttccaaggattatttgctattcaatcaacttttaacttaggtggcagcactctttgcttagaaagctctgaatatgtagatgcgaggacttattcatggaacattgcctcccaacaggtcccaataattgttaaactgttgaatcatcatggctttttaaagaaactgacaaaagatagaaaacttgtcccagaaaacaaatcaattttctgaaggtttttaagctactgaagctcactcatagattcttaagaatttctacatttgactgccaagctctaaaacacaaatgtagccgtgccacctccttcgcactccccattttcaaattattttccattttcccagggtctaatgaactatgcactatgtacttattcagattactcagtctggcacacatggtcaccaacagcatggctccaattaaacttccaatatgatttcccagtagagctgttattctaactatcctagtttacctcattctacttgcccgctttcattcatcctttcttccttctttttcactcatacctattaaaattcttactaactcacaggctaattcttacataaaaccatttctaacatctccaattgaaatactaccctaattatttttagtatctattaaaataagtttctggcctgcacaatatagtgagatctcatctctacaaaaaaaaaaaaaaaaattgttaaaaattagccaggcatgctggcatacccatagtcccagttactcaggaggctgaggtgagagggttgcttgaaactgggagatagaggttgcagtgagccaaggtcacgcagctgaactccagcctggccaaaagagcaagatcctagctcaaaccaaaaaaataaatagtttgcatcccttgtataacatttaatgtagtatcttggattataatttctttagtgcctctcacccccagtaaattgtaatccacttaaagaaatgagtcttaaatttaattttactacttgaagtttttagaaaaatagcttgtccatagttggaaattaatcaatgtttctaaggcattataaaaatgttatgatgctataccaatcatgtggtactcatcttctctctttactcaagatttgctttctctgaagaaagcggaattgtgaacaggtgttgaaggcacacatcatgagatattgtggagcaaaagagcacacataaatattgatgtttatcccatgtatttatggtttgggggttgagagaactatgttgatgtcagaatcaacagagttggtgttaaagggcaattcctttctattttcaggcaatctacacatcatggttagtaggtttctaaataaacgtcaagcttggatgttttgtaaaatattagtttcagtacagtactgttacatgatgttacatcaaagattttgcataggtatccatctagttgctctacagtgaataattgggtgggggagaacattgtggatgttctaattactgcacttcatgtgtttgctgtatttagaaatttgaatatttccagtaagtaagccaggtattctggatttaagtaaatacaacttcagctttagtagttgtcactgtatttcctctgacagtttactgtgtttctttctctcttttaaaacttcctcttctactttaagtactttatccattctgtttctaggacttgtcatcctctgctcattctccacatcattatgttcttttactaagaaattttatttccaatctcatttctttttaccccagataatttttttcctaataattttttttctagttttgatttcagctgccaaatatttgatccaaaatggttctcttattctcagtggtattcggattccttcattgaatttgcctgcactggaaactaaaccagtcagaagaaccctttggtgggactttggttctggatttcattcagggaccacagagctgctcttgaactcaagcgttctcaagaagacacttcagtgctctgctagtaaaaactgtgtatccatgcaagttcagactcattacataagcattccaattttttttgtcacaaagaaaatcgtgcacatctgctatttaaatagtctctggctaaaaaagttgttgcttctatataagaaagcatagcttagatatacattacagtgtttcttattgtcatccaacacacacacattctgtttgcttaatccattgcagtctccttctctgcccctttttacccaaagttcctttcttggagtgagatgagggaatgaaggaaggtttagatttaaataaacagactgtaggggtttcctgaggctatcacatggtggatgcctctgctataaaactttgtcttaataaataacattatattcacatgaatattgagttaaattgattcattttgtgtgtccttttaaagattgactttggaagtctccctttttaggagattttagaattgtgttggagaaattggaatttcattaacaacatatagtcaatgcaggtaactgtttcaggtgcttcctcaaagcaaggatgacccaggagagatacaatcatcttagtgtgctttatgtgattcatatgaaattcaacccttttggagtttcagttcttagcaaaataccacttcctgtttttgaggaaaaaaatggcataagaagtcatataaaaagactcataaggcccttggacatcaaataactcttacaaaacaatattttaatgaattaagtgtaaatgaatcagaaacatgtgggttgaatttcccttgaaatacccatgggcttaaaaattaaggggaaaaaaaaaaaagaattgcttggcaaaaaatcatgttcattttatcgagctcaagccttttgataaaaaaaaaagaaaaaggaagcagccttgatttggttgactgaattaaaaatttaaaaaaaaaacacgaccatagtctttatttgtatttttaaattctgcaaaagccaggttgcagatataattatgtgtctatttgggtgtcagattcattaatgttagaccatttttcaaggacggtaacattttgattaaccagaattctcaagtaatggttgtctttcccagggcagaagtggcagccagaaggagaactaaagactgtagttcaaataaagttcattagagcagaagtaaagaaaacatggtaatcattcagttcactaaccaagaagatccaaaatccaaaggagtagtgggcccggttagctaaccactgaacaaaagtctagaaaaacagtcatgcaagggctggagctcagaagataaggaaagctaaaaataagtggaaaaatctgtgtactgaggggaagatctgggataaaagaaaatgctgacaaaagaaaaataaaaattgcaaagactgaaaaacttcgagtggcaactagaaatggccaaagtacagcagggcagaggggttggaaaacttctagagataggaaaagccgggcagatatgaatattcaatgccgtattgtgaacacagatgttaatatgagtaaaaaatgtgagttgttggctctgccaacttcgtcatagaagccatgctactcactgcacctgtaatgtgcttaggttagggtgtcttaaaatacctatggatgcacgcaagattatttatgactcatttgcagagacatgtttatattcagatttattcaggttttggtggagtgaagaatttgaatttagagagtctaggagacctagttttctgatagggaaaaagctgcaattggaagagagagtaaagatgttacatagtaaagagaagtttgggagtcacccttctccagcttagggtagctcagcttccctctgtaggtgagaacctgtaggtcaaccaacataatgtttagttctttcagaaatatttgtcctgaactcttatattaataaacagcttgttttgtaaagcagagataggttaaagtctttaaaaattatttttatttccaggaaattctagtaaatgataataatttgttgatataaatgttacctattgatgacacctatacacaaagaaagtattcaaattgtatagaaaacatatctattgagaaagttaatctttttatttaaatagtatttgtttaagcatagattttagttaaaagccaaaagtatagcttttactagcaattgtgccatgatactgtctaccaccagtaacaacccttcaccctaaaaaataattttaaagagaaaaaaccggtaaagcaataacagaagtgggcatacattttggggatagtaaactatattttgtctttctagtttgttaatttaaaataaaaataacaggaaaagacaaaactgaaataaagaatacatttgcatatgatacaaactcgtagaaaacttgagtgccaagacacagctgatgatattaaaaagggaatgatgtggaactcagatctagtcattgagtcataattaacactcttaaatacagattttgcctttgcccagaaaagcaggcagttttttagtctttttttatttttccacttatgttaaagaggtaatgggaagaggtaggggagggttatttcaggaattttttaagattatatcaagttttatcagtagacagccagttcgctgtcatccacctgagagaatcatggtctagtattcccactcagtgattttatttttctgtgatcattaccttcagctatgttccatcaatcttcctttcttaaccttcagtgccatttgagcagaatccaaaatgttttggcacttttaattactaaaatctataccttttaaattttaatgtaaactcaatgtaaaaatcaacttctccttttacaccagcctggatttgagctgaagctcaaatggtcacagaaggctgctgaagttgtcttaagcaaggtctggctcagagctgtctcttccttgccttcttctgggagtagctcctccagtgtgctggagtggaagaaacgtgagcctacagactgagtgtcttggcttaactgttcttgtgatcctctctcttactgccattacttctctctctaacactgactggcctttgataaactccaggtcaccatgaggtggcaaattttcacatgctggtgaaagagcccagcaagtgactgaagcttaaagtctactttaatcacctcctgaaagctctggtagaatgccccggttgctaaaactgtaacctttatgtgagggataacctctttgggattgttatttttctataaacttgagataggcttatatttatttaagaatactttcatgcagttatattacccagtacccatctctctttgcttaaatctttcatactaagatttataccagcttttaaagttcaagatagaatctaaataatttgatgagtctcgccattcaggattagcccacggagctatctcacctatttcacaatatgttcttgtgctctttttgaattctattttatttataattgcataaaactgtaggtgaatgaccctggatgtcatcacagcagcttggacaatgttatcagtaaatatgcaatatgtgtgcactcacatgagtgtgtacacatctgagtgtgtatgtatgtatgtggggggggcttatattggagatatggcaaggagaggaggagtaacaaaccaaggcaaaatgaaattatgctgtgtagtcatttcatatcagcacaccattcactatctttatccaaaattgcctttcgaaaaattaagtctatttaatatactgggaaggggacttaatgagttgttgtatgcaaattcctgattattttccctctaccatcagcaacagttcaacaaagtgcatctcatcttactcttagggttgtttaagaacttgatccctgggaacacctgttagtagcatggcttaaaattctctgtgttgttttctccccctttggaagctgtttcacccagctgctgataattagaaaaacaaagcaaatccctctcatggatgctgtcctctggcgaaagccaagcagcataaagccaaagaacaccgtaagcctttttgttttaaacgaggaggcacgctgcactatattcctcttgactgcaaaaccacaggaatggattaatatcactaaccacaagagacctttgtgtacgaatgtggggggagggcatgagaagaatattaatctgtgatgtatgaccttatagtttctgcaaaaagttaaaagctgcatgtatttgaatcaacgcatgataaatgtatcagccatataagatgaataatatggctaaataccaagagctgagctctttcccagaattaactatttttaactcaggaggcttttcaaatattatgcagagatggacattcagtaaatagaacagaattaaataagaattcaaaagcaaagcaaaactctagcaccagataagccccttcaattaatccttatcttttaatatattacatatacaatacatgtatgtctgtaatatattcagtgatatgtatatatgacacttagtgaataattaagaaaaacattaaaattgatattttattgtgtttaaatacaagatgaactgtagaagcaaaatgatagtttatgtgtcctacatacttttaaaagaaataaatcaaggtgcattttagtaatttaacatgcttataatacttttgtttgttgaaataagaattttctgaacatctaaaatatgcaaagcattttagtaggtactacggatactaaagaaaaaaataaaatggaagagaagcatatttgtgaatatttctcaatagtctgggattcaagatcttattccaagttgcatttcaaatcttattactcttctacctgtgtgaccctctcccagtacaactgtttaaagattctaaagtgaatcctagatcttcagcaaaatatatgccctttgtatataatacctccctccatctttaactgtcaaaattctgcagtcttcaagatgtgataaaactcactggtagattattgcaggtggtcatcatggtggcaattagggtctaatctagggtgatgaaaattgaggtaaaaattaagaaatagattcaatagattctactatattgaaaaatgtaagaggtagacattagttatccgtgagtaatgaagggaaatcaggtgtttgtgatgatgaagatttcaaatctgggtgactaaagaagattaatgccgtgaatacaaatagggatgtcaaaaatacgggttcagtgtgtgagacaaaggtgatcagtttagttattttaaatgtaaaatgtctatgggacatcctggaaatatcataaaaacatataaaaattagaagaactttagtctgggcatggtcattcatacctgtaatcccagcacttttggaggccaaggtgagcagatcacctgaggtcaggagttcgagaccagcctggccaagatggtgaaaccctgtctctattaaaatacaaaaattatccaggcatggtggcatgtgcctgtaatcccagctactcaggaggccaaggcaggagaatcgcttgagcctgggagatggaggttgcagtgagcagagattgtgccactgcactccagcctgggagacagagctaaactccatctccaaaataaataaataaataaataaataaatataggagaatgttagagctgagctataactaagctttatggtgcatggtgcaaatgcatcctgctggaaagcaatgcttgaaattatgagactctggaggccaacaagaaaaaacattgataaacatttatctctagagaacaagaaaaggttgaggagcaagcaaccaagggactcagaagaaaaactttcttatattgaagagactaggaaaagagtatcaacagccacagagttcaataatgttatttactggcagtctccaacctttttggcaccagggaccagtttcatggaagacaatttcccacagatcagggtggagggtggtttgtggatgattcaagtgcattacatttgttgtgcagtttatttctattatgattacattataatatagaattaaataattatacaactcatcataatgtagaatcagtgggagccctgtacttgtttttccgcaactagaaggtcccatgtgggggtgatgggagacagtgacaaatcaacaggtattagattttcataaagagtgcccaagttagatcccttgcatgcacagcatagggttcacgctcctatgagactctaatgctgatgctgatctgataggaggtggagctcaggcagtaatttgagtgatggaaagtggctgtaaatatgctgaagcttcaatattaggaagcagccgggttcctaacggttcagtccgtggccccaggactggagacccctgttgtatatgacaggtgtccaggaataaaaataactaatagaagatcaccactcagtggaaactggtcaactttaaggaagcaagttgtaaagagttagctgcaaaagaagtcatagtgcttggatttgagaatgaaaatagcgagcaagtcaggaattgttgcgggaagtcagggaccccgaacgaagggaccagctgaagccatggcagaaaaacataaattgtgaagatttcatggatatttattagttccccagattaatacttttataattttttatgcctgtctttactgcaatctctgaacataaattgtgaagatttcatggacatatatcacttccccaatcaatactcttataatttcctatgcctgtctttactttaatctctcaatcccgtcatctttgtaaactgaggatgtatgtagcctcaggatcctgtgatgattgcattatctgcacaaattgtttgtagagcatgtgtgtttgaacaatatgaaatctgggcatccaaaaggaacaggatggctgcaattttcagggaacaaaggagataaccattgggcctgactgcctgcggggccagacaaaacagagtcatatttctcttcttacaaaagtgaataggagaaatttcgctgaattctttttctcagcaaggaagagccctgagaaagagaatgcattcccagggataggtctctaaaatggccactctgggaatgtgtgtcttatacagttgtaggtatgggatgaaattagccctggtctcccgtagcacccccaggcctactaggattagaaaattcctgcctagtaaattttagtcagactggttgtctgttctcaaaccctgtctcctgataagatgttatcaacaataatgcgtgccctgtgggacatgacacttcatcagcatttctaatttcaccctagtccagtgatctcgctctgcccccatttgccttgtgatattttattgcccttgaagcttgtgatctctgtgacccacaccctatttgtacacccctccccttttgaaatccataataaaaacttgctggttttgtggctcaggaggcatcacataacctgccgacatgtgatgtctcccctggacacccagctttaagatttctctctttcgtactctttccctttatttcccacaccggccgacacttaaagaaaatagaaaagaacctacgttgaaatactgggggctagatcccctgatatcgaataatactttattccttggggtttgaaagtgaaagatactcaacagagattttcatagcttaagggggactgaatgagatagaaaatgtgatccttgttacctaaatatttccattcctaaaattatgtttgatagtgagttttcatacagcaccagctcatattccatttttttaatttggggaaaaaataacaccaccttctaatccatactcccaataacacaaaacatacttcaacaccagaaacaatctagcaaaaatttgtgtaatacaatgtaactaagtgccaataaactaataatttaacatgtaatgaactcattagcaggtatgtttcagtgtgatagaaaaatactatagaataatggatattggatatatttacctccatgctgtaaaaacacatattaagatgtaaataaaaatacaataatctgttaaagatatgtctgggttggacccttattgaggtacatttcaaccatcatttttccagaaagctctatcattattcaacctcttttccccagaaagaaagaatgagtaactcagaggatttttgtttgcttgtttttgttttgagatggagtctcactctgccacccaggctagagtccagtgacacaatttcagctcactgcaacattcctctcccaggttcaactgattctcctgccttagcctcctgagtagctgggattacagccatgtaccaccaagcccagctaatttttgtatttttagcagagatgggatttcaccgtggttgccaggctggtctcaaactcctgacctcaattgatctgcccacctcggcctcctaaagtgctgggattacagacgtgagccatcatgcctagctaactcagagttattgatgttaaaaagaaaataatagtaatacttgattgcctacatttcaccaggtactgttataccatatcttgtgtcttctaacaactccatgacataagtaacatatcatcagcctcattttaaagatgaggaacttaagactcacagtttaagtggcaaaattgtccaaagtcacatagttaatatataagaaaacctagatttgaattctcgtattctgagatgaaggcctcttcacgtaacccttggaatccctaactagtggaggaggagagtcaccttctatttgagtaagcctgtcctttcaaaggagaattaaatgtgataacacacacctggctctacctagttagaagaccaacctctgatacaggagcattagcctctaaagtaagcatgcagttagaggggggatgagatgctattccctgagacttcctactggcaagctggcaaacttgatgccatgagggaactgtctgtaacattttgcccaaggtggaaagttcagtaaagtgtatgtttcttaatgtttttaaagtatttgcttaaatactggttgtagggagtagaaaaaaaaggactagaaggcagtgtattctggaattttcctaatgtgatggaggctataaagagaagttagattttattttgaatccatgtggtcagagaagacctcataatctgatctcttgtctagtttggatgtgtcaactccccacagatggtggggagcgtgtttggatcctgataagtcagttgctgctgtagtgtggactacccaagtcaaaatcaaatcttatccatgtctaaagcaaatattggaacaagatgaaagaatttgtgcacctataaagatcacagacatgacaatgtgaccctagaataagatatcataaaagaagccttctacagtaggaataatataaataaaggagattaagtgtttacaatagttctttgagggagagaaatgatcctcttgttggcactgcatgaaactgattttaatcactgtaataggggacatagatagatgctttatgaaaggaaaattctataatagaacacttaggaggaaaaatatttttttctgtgtgactagaaggtctcagaagaatcaagtaatatgttgtgtggatgctgggtaattgctgtttgatgaaagaaaagttgggggtggggaaggagatgttctaaagaagagctgtaaaatccaaccagttcaatttgctgcaaaattgcttcctgttataaagtaccaaaattcaaaaaggatacagtttggtctagggaaatcacacaaaacaaatatctaaaatccttaaaaattgcattagccctacaccacaacgaaaataaaacactgagtcagtgagaaaataaatctacttcttatattattacttttcttcttgaaatttggcaaaatatactgacagtgtattattacctcaaagtattctgtgggttttttaaaatgttttccttttaaaaaaatcaaagttacattttgtcaaatgagtgttatataagaaatatgaagcgatatggctataagaggaatacaaattttattttcacatccagattctaagtttgtaaagaaatacttgtaccatttttctctaatattcaagcaactaacttgctacccactaaccttgcaaagattagttagctgcttctgtgtaagtaatgcaaatttaaagcattagctctaggcaaattaatgaataggtctatctggccagaatcatagacagaaaaatcctcataatgattaaaaagaaaagactaaaaaagaagaggaaaagtagaagatgaattagatacaaaagaatattatattactggcttagtcacttattctaaaacctaccccttccatatggaatattgtaccagggcacctgaatcagatgtgcatagactctgacactatcttgtcttcacttcaccaatggagttcattatgtgagatttgtagtccaaaacaactctcagaagcaaatcttcgaaatatgcaagaatttggtttggaatgagttaatttccatgctttggctaaagtagcagaacaagaaatgataggcatagtacagagaatggagaaattaagctcattccagaaagcagcaagctctactagaaagaaaactgagagggtacgaacttcttattttaggctatcaatcgacacagcagggcattttcacctaattttatggattaaggatttgaaaatgaaagcacgctgaagggctagttctaagaggcaaaaaggttcagtttgccctggatcccgaatgggtcaaaagtttttatagttcaagtagattccaataatctgttttactgttttaggaaataaaaattaattgtaagaaatacatttagtaagacctccaaatgtttccaattacatgagatattacatttaaacattatgcataaatacaaaggatgaaaaccatgtattggttcattttagaatctctgtcatcctatttaggaacgagaagggagaaggatggttctttggccatctagtagggccatctactgtgaccaccaatatggactcataatctcggaataatacaatgcattacctttagtaagaaacagaaatcttgggacgctgaggcaggaggattggttggacccaggggttcaagagcagtctgggcaacatagtgagaccctacctctacaaaaacagaaaaagaaaatcatcagaaaattagaggtaaatcttccaggagaaaagaaaactaatactcagcagtgtctttacagcaatctaaatagaaagttgatgcaaaccagattaaaatgacagaaaattatgttgggggaagaggccaggcaaatggggatttgcttccattaaatatttaaggaattagtaacattattttaaacacagcagaccagcaggtaccctagaacagtatcaacctagaaatgggctggaaaagtcttgagagcaaactcattttcttactaacttgtttacttaagaatgagaatggaggaagggccctgagctatgtttgtaacgtatttgtttttcaatattaacttaaattcattttagtagatgtttataattgatttttcagtaggtttctgtcataccagtaaatatatgtatatatgtgtgtatttgtgtataaatatacacatatatatacacatatatagtatatagatgtatatatatacgtatatatacatgtatacatatatacatatatatacatatatacacacacatatatatatagtgttttgtcattcatacataaatcagattttatgctatgcacaagtgtgagtcaatgatttagaaccaaaagcgggctgtttaccctataaacgtaataatacatcaagaagtgtgttaacaaacttgcattttccttggtataataagtgttggtgcttctagtcaattctttaggaataatgtcttgagcatagtagcttttgtttttgagtattttatgtcaggggctctgggtagctcttttttaatgaactggctataccagaaatattagtactaaataaataatcatataacttaaaaatttatttgtcatacctctaattcctggttagaataaaagtgtttataaaattaaaggagcatgtgttattattccttttcatttattcgtctaccaagacacttattttagtgtgtttcccataaagtcaattcacacgaaatttggcatcagcataattctgatcatgattctgaaatttgctttataaataaagtactatcaatcatactcccaaattttagaagtaaaaaaaaaaaagaaagctttacttgtttttcatatgctgataaacagaattagatttgcttgcaatgacagctcagtataaattgtataaaggataccaaatatagttactggccttgttgagtttaaaacctaattaagaaaaattatgcaagctatttaaaattgccaacagagaaaaaatacatttgagttttaagggattcaatttagagcacaacatgatttaatttagaacacaaaactttaaaatgcggtccttaatttctccatgtactatgagagggaaattctgttatgaaccatgtccatagattgcttttaaataaacaattttataatgtatgtgggtgaatgagtcctctttaatggccaccatttccgctatatttaattaaattaaagcagaaaagaatacatgcttttactcataaaccactatctgtgttagtaatagtaggagataaaaataaccccaaacaatagctggtagatatcctttaacatctattataaacataattttatatttgagagaaaggagacaccactgacagattttttgcttggagaaaaattaaaggttttgttttgcctgtatgtttatttatttggtttggttttgattttcccttcaggtaatatataactaaggatgtgtactaaaggtctactaaaattttatctaaaattttgtaaaagatacactcaatatgtacataagaagtacctgacctgcagaaaaaaatgtattaattaattagtgtgatattttaaactgagttttcataacattaaaacataaaaattgagagcaagaatagtacttacagttttgctaaaggttattttacagtttttagccagtaaaattgaatcacttagtgccccgaaagcaaagagtaatttgcaaatctcctatgggagtataaattcattgaaaggaagaccatgtctctctcattcacctttgaatgcttgataactatggtagtgtctggcccccaccaggggggctgttgagactcaacagacaccacaaagaacactgcacacacacacacacacacacacacacacacacacacacacacacacacagacgcacatacacacaagtatttgaatcttttttttttcctgagttttttggtcacacacatgatgaaggcaaatgctgcaataatttccatgttggctgtcttcacctctcaatttatctttactttcctcacttagctaactctattcacctttcaaggctcagctcaaagcattacatcctctgggaatccttgcctgtttcatgtattagtagtatacatgggctgtcactcaaagacttctctggcaagtccttttatcatggctcttctctgaccgcatttttcatatctccttcatcctcctccgagctatgtgagagcagaacccagtctagtaatctgaacttcgatgctgtgtcctgagctaataacttattagaaatcttaaacatgcttgaaaagtaaataaactagtgaagcagttaaataaatatgtacaatcatgttttatgacttaattatttcattaattcccaaatgaaaagggagcattactctcgggaaagatgtttgctgagtagtgggaggaatcatctgtacaacttcacccccaaatcattgtctctatttagacatgttcccatggaaaatatggtatatgtgtaaaggagacattcatagagggaaaaaccatgttgcatataactggtttagatactcaggaaaaaaaaaaaaagaaatgagtggaaattctcccaacagtcttcctacgagtcttccccatgaaaatcagattaaacttgtagtttttattttaattttataatttgctgagtatatttcttattagcatattctgaacaattccttagcttagaattcactttatttgttcactactgtttttagatatcaaaactggattgatatttcaggtttttctgtccttttgccaacctttacatcacatcatgtttgttactgaacagaatatatgactttttacagaatggaggccccataaggccaacatttgtgtccatttcgatcattgtatttctagtgcctagaacattttctgaaacatagtagtaactcagtaaatatttgttgactaaactaatagatttaaaaccgaacagtcactgtaatattttttctattacatcatgtatataacaacattttaagctttttaagattgtattatttaaactatttgattaaaggaaattcaaatgctagcaattctgtaccttttggctaacagaatgtacccgatcattcgtacttaatttatacaaaccttagttcagtattaacaactttatttttaaaaagtaaatcatgaaatgttcaagacatgcaaaatctataaaaagtgatgcaacaaatacccatctacctacttagattaattatttaaaatattgtcttctaatagaattaaacattctatgtcacctttccacactactttctccaacataaacacacactattgtgaatctggcaattttcatgttcatgcatttctttataatttcatatcatcacatctatcctcaatatgtgatattgtttatagctgtggttctcaatggatgatccacaattcagcagaatcatcattacctgggaactcattggaaatacaaatttttaagctccacctcagatgtaccacatcaactccagggctagagctcagcatctgtgtgattgcaatgcatgctgaagttcagaaactcctggtgtatagcaacactttgagtctaagtaacatcagagtctctgttctagcagaaatagcacttatttgtgacatctattgatccatttccttcttgctatatttttaaaaagaatgaacctcacagcacgtttttgtttttgttttcctgagatggagccttgctctctgtcacccatgctgaattgcagtggtgcaatctcagctcactccaactttcgcctcctgggttcaagcagttctcctaccttagcctcctgagtagctaggattacaagcacccatcaccatgtccagctaatttttttttttttttttagtagagacgggtttcaccatgttggccaagatggtctcaatctcttgacctcgtgatccaccggccttggcctcccaaattgctgggattacaggcgtgagccatggtgcctggccacagcatgttttttaatttttaaattggagggattgtttctttatcaatttattatgatctaatttaaatactccttttaaaatacttggctgattctcaagttgtagtacatcaagtaagcattttaaaatgtcttctaatttgaccattctactcataatctttataattatgatgaaaaacacaagtcacttgttcagtcatatcacagctttcttaagagatgaggaaacaaacttctcaggacaatctctttgaccagcttttctcattggtgaaacaaaatgaaagatttcatttccatttttaataattttgttatttcttttgcaagtgattgaagccaagcaagttgctagacatgttgtcacaaacaagtttctggccattttgtaaaacaaaaaaaaaaggacagaagtgccccaaattcaccttttctatcaccggtcatgtcttttttcatgtccctcttaaattaaaaatacataggaggatgaaattccctgccttttgcttggaggcatcatattttatgattctgtccttttaatgctttgcattttctctctgggcagagaattatatgaatcgatcgaaagcaactgcgatgattcttttatagtttattatagaataaaaaatccttttgaaagtaaaagaaagtgtacttaaatggcaactggtaacattgctgacacttttccaacctctacctcctgggttcaaatgattctcctgcctcagcctcccaagtagctgggattacaggcaaccgccaccacgcccagctaatttttgtatttttggtagagacggggtttcaccatggtggccaggttggtctcaaactcctgacctcgtgatccacctgctttggcctcccagagtgctaggattacaggcgtgagccactgtgcccggctgacacttttctatactgataggaatcttcatgatcagatgttgtcaaatacttttaaagtttatatataacattgtattaattaaatcatttcaagaggctgtacctacaagcatgtctataaggacaatggtcacattaaactcaaaacagagaagaaatttatttacacttgggtgtattctaagtagactatagtaggccaaaaaaattcagaagataagctgacatagtacggactctggaatgtgtcaaacatctactctcgtaaacacacagactttcaggtaggagatataaatttctctctctgctatgtctattatcttgccaaacagcccacttagttgcataagcccctgcactctgcagacagcttttaaaagaaacctagagtatgttgaagttcagctgtatcactaacatttccatcacttttttgaactacagctttaattttcacgactcaacatagaatcagaatatacaaaagaagttaagacaacacaaagtaacagcagtaatgtcaacaacatttatacatgatagattagatagacagacacacagatagatagatagatagatagatagatagatagatagatagatagatagatagatagatgagataggtagatggatggatagatgatagatagatagatagatagatagatagatagatagatagatagatagatagatgggatagatatgatagataagatagatagatgagatagagagagagggatgggatgggatgggatgggatgggatgggatggcatgggatggcatgggatgggatgggatgggatgggatggcatgggaggggatgggatgggatggcatgggatggcatgggatgggatgggattggatgggatgagatgagatgagatgtatgtatatgactctgttttgcctcgtctgaaaaagatgatcgctcagtcatgaagcatttatacttctggtattcttaatatcagaagaatcccattaatggcaattagatcagaaaaacaaatactcctctacctggatccatactttctgtatgatttggtttggttttctgcctcactccatggccaaggtgctaattatgactgatatgtggctctaaaggaggaaaggtggctaccataaattacataagcatagaattaaataaattatattttaaaaaggtaagaaagactcaaactcatcatgttctaattattttactatactttattatctgtgttcttgaggttatgactatcatattcatgtgccacagtactttttaaaattttgcattcagtggcatcgtgttggtagctcgaaagtgaccatattagagaaatttacaccacaaaaatcagcaaatgcaacctgtcagaactccccttactatatcgccccctacatacattccagagagcctactgtttaacattcaccagcacattatgacaaaggatcaaagccaagaaagaagtttctggaaatttgtaatgaactctaagcccagacaaagaagcccaatattctgccagaataatgaagaaaataacatcaatttgattgatgtcctcctgggtgacttctgagagaagctcaaactattttgattcatttaataaaaaatagttaacacataaagaaaagtataaggatattataactaagcaccttttatacaccatataaattttacaaatatttgttactatattttatttaaaaactatatatgagacctcaaaaagttcatggaaaaatataattaaaagaataaaaaatataaatagtatttttctacataagctccaacaaattcaaaataagtaagtgataccagtgatgataccagccatttagtccattcctaagaaagtgagtcctgagaatatagttatgtcaatgccgtcgtttctccattattaactgaagaaaaattggtgccctttaaaggtttttttaatattttgaaacacaaagaaggaaccaatcagaactgtaatgcggatgtctaaaaatttcctatgaaaatactcataaaattgcccttgttcaataacaggaatggggcaggaggattgtcgtggtggaggagggctctctggtgaaggtttcccgggcgcgggggtggtttctgctaaagctttggctaattttctcaaaaacactcccataataagcagatgttattggtttttggccctccagagagtcaacaagcaaaatgccgtaagaatctcaaagaaatcttttgccatgagttttgctcttgaccagcccagtttggctttgaacagaccaattctacctcttggtggtagttgcttcaattgtgttctgtcttcaggatcatactggtaaagccatgtttcatctcctgttacaatcctttgaagaaattcttcataatcttgatcccacctgtttaaaatttccattgaaagctctgctcttttttgcagctgatatgggtgcaacagttttggcaatcattgagtggaaagtttgcttaacttcaatttttcagtcagaattgtgcaagctgagccaattgagatgtttatgctattggctattgtttctgctgttaatttcagtcccctttatttggggcacaaacaagatgaattttttcctcaaaaaatgacatgaattgtctgcccctgcaggcttcatcttcaatattgtctcgtcccgttttaaaattagttttccatttataaaccactgaatcctttgagacattgcccccataaacttttcttaatgtatcaatcattttaccattcttttatacaggatctaccataaattcgatgtttgctcttgcttcaactttagcagaattcctgttgctctgataggggctcttttcaaactaatgtcttatccttctctttgtgcttcaagctagatgcaactagatcctgttcaaatatgttgtaacagcttagtacaagtttattttgatgcaaaaagtttttgaaatccatgcatagtattttttccataagctattgggttacacgtggtatttggttacatgagtaagttctttagtggtgatttgtgagattttggtgcacccatcacccatatatacattgcaccatatttgtagtcttttatcccttgtcccctcccactcttccccaaaaatctccaaagcccattgtattattcttatgccttcacatcctcatagcttagctccgacatatcagtgagaacatatgatgtttggttttccatttctgcattatatcacttagaataatagtctccaatctcatccaggtcactgcaaatgttgttaattcattcctttttatggctgtgatatatatcaccatttctttatccactcactgattgatgggtatttggtttggttccacaattttgcaattgtgaattgtgctgctataaacatgtatgtgcaagtatctttttcgaataatgacttatttttcctctgagtagatacccagtagtaggattgctggattaaatggtagttctacttttacttctttaaggaatctccaactgttttccacagtggctatactagtttacattcccaccagcagtgtagaagtgttccctgttcaccgcatccatgccaaaatcttctgttttttgagtttttgattatggccattcttgccagagtgaggtggtatctcattgtggtttggacttgcatttccctaatcactactgatgttgagcatttttttcatgcttgttggccatttgtatatcttcttttgagaatcatctattcatgtccttagcccagtttttgatgggattctttgtttttttcttactgatttgagttcgttgtagattctgggcattagtcttttgtcagatgtatagattgtgaagattttctcccactctgtgggttgtctgtttactctgctgactgttccttttgctgtgcaaaagctctttagtttaattaggtcccagctatttatttttatttttattgcatttgcttttgggttcttggtcatgaaatccttgcctaagctgatgttagaagggtttttccaatgttatcttctagaaattttttttagtttcaggtcttagatttaagtccttaatccatcatgagttgatttttgtataaggtgagagatgaggatacagttttattatcctacatgtagcttgccaattatccccgcaccgtttgttgaaaagggtgtctttccccactttatgtttttgtttgctttgtcgtagatcttggctgtaagtatttgggtttatttctgggttctctattctgttccattggtctatacgcctgtttttataccagtaccatgctattttgatgactatggccttatagtatagtatgaaattaggtagtgtgatgcatccagatttgttcttttggcttagtcttgctttgactatgggggctcttttttggttctatatgaattttggaatttttttttctaattctctgaagtatgatagtggtattctgatggggattgcattgaatttgtagattgcttttggcagtatggtcattttcacaatattgattctacccatccatgagcataagatgtgtttccatttgttcatgtcatctatttctttcagcagtgttttgtagttttccttgtagaggttttttaacttctttgttgggtatattcccaagtattttatgtttttgttttcttttgttttgttgtagcttttgttgtaaaaagggttgagttcttgattttattctctgcttggtcactgctagtgttataggagagctactgatctgtatacattaatcttgtatccaggactttgctggattttttttttatcagttctaggaggtttctggtaaatgatgacatcgtcagcaaacaggtgacagtttcacttcctctttactgatttggataccctttatttctttctcttgtctgattgctctggctaggactttgagtactatgttgaagaggagtggtgagagtgggcatccttgtcttgttcctgttctcagagggaatgctttcagcttttccccattcagtattatgttggctgtgggtttgtcataggtggattttattacattaaggtatgttctttgtatgcggattttgctgagagttttaatcataaagggatgttggattttgtcaaatgcttttactgcatctattgagatgatcacgtgattcttgttttaaattctgtttatgtagtgtatcatatttattgactcctgtatgttaaaccatccctgcaccccggtataaaacgcacttgatcatggtgtattctctttttgatatgttgttggattcagtcggccagtattttgttaaggattttagcaactatgttcaccaaggatattggtctgcagttttcttttttgaagattcattttggagctgatttccagttttattatactgtggtctgagagagtgcttgatataatttcaattgtcttaaatttattgaggcttatttttatggcctatcatatggtcagtcttggagaaagttccatgcactgttggatagaatgtgtgttctgtggttgttggatgaaacgttgtgtatatatctgttaagtccatttgttccaaggtatagtttaaatccattgtttctttgttgactttctgtcttgatgacctgtctagtgctgtcagtggagtattgacatcccccactattactgtgctgctgtctatctcatttcttgggtctattagtaattgtttttataaattttggagctccagagttaggtgcatatatgtttagaattatgatatttttctgttggacaaggccttttaccattatatcctgcccctctttgtctcttttaaccactgttgctttaaagtttgtcttgtctgatgcaagagtagctaccctgctggcttttggtgtccattcacatgaaatatccttattcatccctttactttatgtgagtccttatgtgttaggcgagtctcctgaaaacagcagataattagttggtaaggtcttacccattctgcaattctttatcttttaagtggagcatttagggcatttacattcaatgttagtattgaaatgtgaagtaccattgcttttgtcatgctctttgttgcctgtgtactttgattttactttttgttttcactttctaacttgtatttttgttgtatgtgtcctgtgtgatttatgctttaaagagcatctgttttgatgtgtttccagtatttgtttcaatatttagagttccttttagcagttcttgtagtggtggtttgataatggcaaattctctcagcatttgtttgtctgaaaacaactgtatcttgccttcacatatgatgtttagtttcactggatacaaaattcttggctagtaattattttatttgaggaaactgaagatagggtcccaatcccttctagcttgtagggtttctgctgagaaatctgctgttaatctgataagttttccttgataggttacctgatgcttctgtctcacaactcttaagcttctttcctttatcttaagtttggataacctgacgacaatgtgcctaagtgaagatctttttgtgatgaatttcctaggtgttctttgtgattcttgtatttggctgtctacgtctcttgcaaggccagggaagttttcctcgattattcccccaaacatgttttccaagtttttagaattctcttcttcctcaggtacattaattattcttaggtttgctcatttaacataatcccagacttcttagaagctttgttcatattttcttattctttattgtctttgttggatttggttaattcaaagaccttgccttcgaattctgaacttctttcttctacttgttcaattctattgctgagactttccagagcattttgcatttctaaaggtgtgtccaaagtttcctgaattttttatgttttttttttttctttaagctatctatttccatgaatatttctccctttacttcttgtatcattttttggatttccttgcattgggcttcatctttctctggtccctccctgattagcttaataactaatgtcctgaattctttttcaggtaaatcaagggtttcttcttggtttggatccattgctggtgaactagtatgattttgggggggtgttgaagatccttgttttgtcatattaccagggttggttttctggtttcttctcatttgggtaggctctgtcagagggaaggtctagggctgaaggctgttgttcagattcttttgtccccctgggtgttcccttggtgtagtactctccccctttttctatggatgtggcttcctgtgagctgaactgcagtgattgctgtctctcttctgggccccaccacccagcaagtctccctggctctgggctggtactgggggttgtctgcacagagttctatgatatgaactcaatgggtctcagctgtggataccagcgcctcttctggtggaggtggtggagggtgcaatggacttcataagggtccttagtttggtggtttaatgctctatttttgtgctggttgggttcctgccaggaggtggtgctttccagagagcatcagctgtagtggtgtggagaggaactggcagtgggtgggcctagatctccgagattatatgccctttgtcttctgctaccagggtggatagggaaggaccatcaggtggaggtggggctaggcgtgtctgagctcagactctttttgggtgggtcctgctgaagctgttgttggggatgggggtgacattcccaggtcactggagttatgtaccaggaggattaaggctgcctctgctgagtcatgcaggttgtcagggaagtcggagaaagctgacagtcactggcctcacccagctcccacgcaaactgaagggctggtctcactctcactatgcccccgtaacagagtcagtttttaggcggagggtgagaatggcttgaaaatttgctgaatgctatccatctcccagcccccagagaaaagggctttagttcctccccctgcctgtgaagtctgcaggccagattcgcgccctcccctgagttctggccaggaggcttcttgccctgttcaaatggttacaaagttcagctagagaattccttctccctgtagagttttaccccctgctcctctggccgccctccggatggatctttgtgttgccaggcaggaatgggctgcttggggacccagtgagctccgagggcctttctgctgcttcctgtacccctgtatttcgctcagctctctgacttgactcagctccaggtaaagtcggaaacttctcccacaaacaccttcagcttctccagtgggggtgtgtgttcgggacactccctttcccacttgcacagttgggacactcatagtatttggggtgtctcccgggtcctgcaggagcagtccgcttccttcagaggggctgtgggtcttcttgggattgctactttattcttgaagttgatctggagctaaaattcacagtgcaagcctccgtaggttgctctgcctggagcttcaatctagtcctgcctcctgtccatcgtgatcccctgaatctcagcacacatagtatttttgataatacatattttccatgaagttttgaagatcctatgtatttaaatttattttcaccaattttatttctcttcctcatatcccagagttaactaattttctaaacttggtgttcagtactaccatttttgttatttcacacactacataaatatctaatacaaaaacactatcttgtattgcactgacaaaatatatacgtatttttagaaacttcttgtttttcatctttatttgtaataattgattcatgttgattcataaagctttgctcaggtatggttaaacaactgctaaattccagtattctattgtatgaaaacgccaaaatttgtctatctaatttttgactgatggtcatttctaattttgcctcatagcaaaaagtgctacagtgaaaatatttgctttatatacaagtctttatataaaagtgcagtggattcactaggctacatacctacacacacatacacatgtaattttttactttttgggttagtggatttttccctagatttgtgttgccaaactgctttctcttatgttgatactgatttatattcccatcagatatgggaatttatttcttttttcttttctacatctgtatcttcacctggtacagttacctttttaaattttgagggaaatggtttatcacgtgtgcttattggatttttctcttctcattagcgaactgatttttctccctgtgctaatttaaatttactctttggagaattacctgttatttttgtgaacataaaaaggtcaaattgtcaaggcagactcacatggattagtgctgttatcccatgtcaaacttcactgataagtacaagggtacaagtaaacacaagccacttccagaaaagcaaggagtggcctgggacatctatgacagctgcccagatccttccttttcttatcatcacactctgtcccaggttaataaatagggggacaatgaaaaatgtaatttgtgtatttaatgttcattgtttttaaataccatatgcttaaattattatataacatataaacataatatccctatttaaaatagcaattataaataccaagatagaaaccaacaattcctctgccttcacacgccactcctattatcataaacagttcagtatgaatagtttttcatatcctttcaatcctactaatttatgaataaataaattaaaactttacttggttatattgtttctaaacacattaaatccatacctattacaaaaatctctagttagtagtttaggtctatatcaaatttaagagaaaaaattaaaaaatgccttcaatatgaatgattccattgttaatgatcattacttttttgtgcatatgtcctttcaaatgtttttagtttaagctttactaaaatatttactatgagctgagtgaaatgataagtttggttcaactggtaaattgctctatttttgcttaagacaaactatctgatactgttctttatattaagactcactttgttaagtgagagttttcttaaatggtctgtttcatataaaatatctaaattgtttaaagcccttactaaagttactgtataaaagtaattcatacggactacatttcttgacactaatggcatataaaataagcagtacaaatgcatgaagaatgagagatttttgataacttgacttaacgtttcatagattcattctgtagctaattagtttttcttaaattctgcttagtctagtagcaactgtgggcataacatttttggcatcgcgaatcagacattctagattagttggtaatgataaaatgacttttggtcctgaacgcttactttattctacttgtatacatcgtgcataatatttttaagaagtaaaatatgcaatgaaaagtattctacagaataaaaattctggcagtgaaatgtattaacagatatttgaagcatattttgtaaaatgtgtattcctttgcagaaaatataaattgacgttatgatgttcaaatactattgatcttgtgttgggttaagatttttaggagtatagtttatagcatttcaaatatttttctgcaaagccagcattaagttatttctaaaagtttgatctatttaaaaatgctaagatcttgattattggctctctaaatcctgcagttcaggacattttgaacaagctgcagaattctaaaagacagaatacgtattgagaagaatataaaatagccaaaagccaatgggttatccttatgccagtcatagtataaagtattcaaaaacacttgtttaatttatgttccagctaatatttgacagttattacatagaaacacataataatatgatttattttatatgtgaaaagataactttacaactttatgaacagcaggtaaattgaggaaagatgctactagcagtaaatatgctcacagtcagactgaaacctgagtctcctttgaaaattgattatgggctgggttcagtggctcacacctgtaatcccagcactttgggaaggtgaggtgggcaaatcacttgagcccaggagtttgagaccagcctgggcaacacagggagacccccttctataaaaaataaaaagagaagaaaagaaaaaagaaaattaattatggatagatatcaaattggaaattaccattgattaaatggattgttactgttgttgtcattgttttctcaattaattgcattaatatgagagactcctgagggtacatcctatggtttggtgaaaagagcaaatattaataatttgggatcataagaaccagttgtatttctcaataatagtataatttccagcacacagcattgttaaaactagagttatatctgcaaaatactagctatatttctatgcaatgtagatatgttggaaataaaactgaaaaaactttgtaactgcacttgaagagctttctgatcttcttatcaagaaagttttcttaaaatgctaattaaaaggagcatttaatcaaagaatccaatgtgcctggtgtgtaaggcattctttttcatggttttaagacattttcacaaatggcatctatacacaaaactgataatgatgaaacatctttagtctgccattctttaagaaattatggtatgagttcatacttattaaaaaattgtctatgatgatgtttatttctgcttatataatcttatgaaaattgtattaataagaggggatgtttaacaaacctattttagaagtgttacatcaatttcactgccttttcctagagaattaagaatgaatgtgacatataacgtctaacccctaatttggaaattaaattttcatatttatttaagttgattttagtccaagttttgaaatgtgattagactaaattcataatttaaaatatttttgaaggaatccattaactgatcttgtaaccaggatttttgtgtgacaaatgataatagttatattaggtatctctacaaaaaatattgaggatttttcagtgtcatacaagccatgcagtactgatccatgcttttatgaaccccctcaaataaccttgctgcaatgggtcatatactgggcttcactttgaagaccacccaaaatctccatctgctccacacagaattgccatcctgctagtatgtattccatggtctacagctggtattaaacacattcattcacgaagcaattcaatatgataattttcatttaagtcaaaagtaaaatattattatagcagttacattcacgattatcccaatttccaacaaatactcctgacagccagctttggtctcattgccataatatcaatctctatattatcatttctagagacagatgcacatgctatggccatgaccataattctcctctttagaatgcagtggctggctttctgtgcagcagattagacactctattaagtcatatagatgataaatgataaaagatagatagatagatagatagatagacagacagacagacagacagatagatggtagatgggggtgggggagtgaggggaaccaggcttttggttatgaacctaatctaacttcctgtgtgacattaatgtaactctctattgaagagtttctgtacttttgactaaatctctcaactagagctataatatttcaaaatttccagctttctgacaaactagttgaataagagaccaggtctaagagcagagatgagctgtagccctatgaggaaaatgatcaaaatttggaaaattgaatgtacttagaatagttgattacagatagctatattcttccaaaatcttcttcagtaaatagacttttagaatacaaatgtactttaaaactttcaatatatgtttagaatgatacaacagaaataaaaatcctcattcttaactttagaaattaaattcagattagaggggtattaattaatttttgaaatttttgagtcaggaaaactttagcaaaaaactagtatcattttatcacaatacagatgaggaacttcagccttaaagatactaaaatttatggctaatgaatcaggtctaaaacccagatctaattacttaccagcttataaccagaatcaaaatgtgtgtatttattatttctccccaattcacacatttttactattcaatttgtggtttatttttaacttgtagataatttgttttaagattaatagtctagatatgaatatgcctcttttaataagtattttaaacctcaaaatatcataactattttataatgcatcacagtatttaggagattctttgaagggtttctaaaacaacttttataaaaatagtgatatttgtgtttatatccacctccaaaactacacgtttgcttatatttcagaatattttgaaaagaagaaatttataataaaagtagctgctgttcacagaacatcactgtgtatctgacagtgagttgaactcttgaggaatgtgtgttttattattaaattctcacaacttaaaccatgttaatcactgttccttccattttacataggaggaatctgcatagattagacgaaaaagttaaaaggagtatgaatgaaaaaactacgtgtacaagatgtccaagatgaacaaaactatacaataaagttcatttcaatatacaacatgtattatattcaacaaggctcaaattttttgataaaaggaaacagagacctctttttctagcaggaagatatttttcttgggatgttttgtttatgctggcttgaataacactatggtgaatatcataagattaattcatttttaacatctctgtaaaagccaaggatgcagtgtgtccgtggggaatttaaatcatacattttaacacacatattaaaattatggattctcaagtaatgataaattaacagaaccctttgagttttttttaattataaggcattttttgtttgttggtttgtttctgttttttgagacggggcctcgctctgtcatccaggctggagtgcagtggcgcgatcttggctcactgcaagccccgcctccctggttcaagaaattctcctgcctcagcctcccaagtagctgggactacaggcacccgccaccatgcccggctaatttttttgtatttttagtagagacggggtttcatcatgtaagccagaatagtctcaatctcctgacctcgtgatctgccctccttagcctcccaaagtgctgggattacaggcatgagcaaccacgcctagccaattataaggatttttaattaagaaaattaatttttttaaatgtgactttttatttaattctttgctaaattaactgtatacgggcctacaagaaaaatattctgtttccattcaaagtaaaattatttgtaaaatattaagcctactaataatgtcatcaccattattattttaaacaaaataggagacttgtgcaaagaccactctcatctaaaagccatgacccaactaccaatatgattttctttaaaaaagaaataagaatgcttttacactgttggtgacagtgtaaattaattcaaccattgtagaagacagtgtggtgattcctgaaggatctagaactagaaataccatttgacccagcaatcccattactgggtatatacccaaaggattataaatcattcttctataaagacacatgcacgtgtatgtttatcgcagcactatttacaatagcaaagacttggaaccaaccctaatgcccatcaatgatagactagataaagaaaatgtggcacatatacaccacagaatactatgcagccataaaaaagagtgagttcatgtcctttgccgggacatggatgaagctggaaaccaccattctcagcaaaccaacacaggaacagaaaaccaaacactgaatgttctcactcataagtgggagttgaacaatgagaacacatggacacaaggaggcgaacaacacacaccagggcctgtcagggggtgggcggcaaggacagggatagcattaggagaaatacctaatgcatgtggggtttaaaaccttgatgactggttgatagatgcagcaaactcccatggcacatgtatacctacgtaacaaacctgcacattctgcacatgtatcctggaactcagagtaaaaaaaaaattttttaaaaaggactttgctctgcttagaaatgggaataattatgacagaacaatattaatggaaaacacatggtagatatgaatgaacactgtgaaacgttaggaagcagggaatgaaaaattgcctccttgacaatagtaaaatttcaacatgatccctgagaaccatcagatttttaaatagcattttctccccgctaccctgcatagggtttgagtttctagcaggctcctaggcgatgcgagtgctgatgcacgaggtcacactttcaatagcaagagtacaggcaccacttaaagtaacaattcacatagatctgtttatgacttaaaagttaataaaagtgttctataggaatgctaggaaagaaagaaagaaaattctaaagaaaaaaataataattcctatagtcttcaaagtctgaaataatcattcccatatggaggcatttccttccaattatttttgtttgtatatagttaactaatagttacctattttgacatctaactttgttacttaagaaaccatgggcattttccccatgtaaatatttttttcataaaacaccttaaggccaacagaatatttggccatttagttataccataacttattagcccagtttctctcctgtgaaatatttcgattatttccagtgtcttattagtataaataatatgtgggtaaataattttaaaatttctgattattttcttataaaaggttttctaagagttggattactttgtcaaaggatatgaatggtttaacactcttgaattatattgcatatgctgagtctatctcagcattattgttttaaaaatatgcttgtcagttgaataaatgtaaactagtattttcacttagtttattttattactaacatgcttttatccatttcaatggctcctgtcctgagaaccaatttatgtctaccaaattgtttcttattttaactcaataatcatgttagagttccttttatattaaacataaattccttacaagtattttccatttttgtcttttttatttatttaatttttttaatttaatttttgtgtgtgtgtgtgacggagtttcgttcttgttgctcaggctggagtgcaaaggtccaatctcgtctcacagcaacctccacctcctgggttcaagcaattctcctgcttcagcctcccgagtagcaggaattacaggcatgtgccaccacacccagctacttttgtattttcagtagagactgggtttctccatgttggtcaggctggtctcaaactcctgatctcaggtgatccatccgccttggcctcccaaagtgctgggattacaggcgtgaaccactggtccgggccttatttatgtttctaccatgaagaaagttttgattttcacagtgttttatatgtagaaagtcattgcaaattcaaagctgattttgttattttatcttagattattgtggtttaaattttttaagtatgtaatctaactgtaattgatcttattcatgtgtagtttggacctcatttgattttgtttccaaggtaaattttcaaacacattttgtttaataagaaatatctgcctcatgagttttgatgattcttaaatcatatattaaaaatttaggaaagcagaagttgtctccggacattctaatggctttcacaatacatctataaatcattgcgatgacaggacacatttaattatgtctaaaatatctgggggtacacttctttaattccaacttttcttcatctactttataactttaaaataaaaaaggatcattctttcagatgaataaccatattatgttaaaagttaagagtctcctcaagactatgagtggctttaatgtcatatttaaacgtcatgtgagtttcctattgctatgtaattaattactacaacgttagcagctcataggtcccaagtccagcacagtgtggttgggctcactgttcaggctgaagtcaacgtgacagcaggctgtgttgctatctggtgtgaggattcttttccaagttcatttctgttcttggcagaatcagttccttgcagctgtcacactaaaatcctctgtcgttttttttttttttttttttttttttgctggctgcctaccataagtgtaaattaatctaggaaaaaataggacactttaataatatttagaccttcattaactagcttaagcaaaattcaatatattccaaattttatatatatatacacacacacatatatatattcataattcttataatcatgtttgtacaggtcttttatgtgtgctgtacagatttgcttatattttgcatttgatttgtgtacagatattttagtctaagtcatcagttataagaaaacttcagcattttctctctttcttcttattctcctaatgcctatctgaaaccttttggtaattcatttgtttttagttagctatctttagttttctaatattaattaaaatgtcctgaaatagttatttgtttgcaatacttaaacataattaaatttcataatgtaaaatattaaaatattaatattattaatatatttaataaatttaattaactataataatagttatattttataaccatcacataattatatttaccaatggctactgatttcatatagtttttcttaaccatatttcaaaaactaactttctagtcctacttaaaccatttttttcttatgttctgctttgctttttaatagaaatgagtatcttttttttactttcgacatccattgaaatgatcttataggttttcctttagaattattggtgttatagtagcaattaattttctaaaatttaaagcaaaaataataaaatgaacactgtttaagtgtatagttggatgcattatgacaaatgcatagatttttatacccactacacattaagcctttgtatacaatccccactctgtcatcccagcaccagcaaaccagagatctactcttaaatatcctatgaatggaatcacactatatgtactgtcttgtgaatgtcgtctctctgtccacataatgctaatgagattcatccacgcagtcgcatgcatgggtagttcattctttttcaataggaagcattattccacaatctgcttattaactctcctgctgataaacattagggttatttactgtcttttactacgttgtgtaaagcttctaggcagcatcttgttcatgtccttgcgtggaattacatggctgtagagcaggcatatgtttaacctttcaagaaatggattaatcttccaaaagtaattgtaccactttatactcccacaagcaatgtatgaacgttccagctgctccacttcctagccaacacttgggattgatagttgttttaattttaggcattcaaatgggcatagaatgatagttcaggttgctttgtaagtatattagggaagcatccaacttacactcgatgaggtcaagtaagaatttctaaagaaaagaatatgtaagaagaatactcaaactgaaagaaaacaatctattaatgtgtgattcttacttagccatagtgaatagctcttcagacatttttattaaacttgttttggcactattttgattagaagtttgcagactgggtcttttgattgtgccagtgtgtgctttttaatgtgtctatgtatgtttacgtgggtatttagacttatgataacttcaaaaatgtatttgataactttccatttttttgcagaaatattctttcattaatattacatgcttatggaactttacctattgattaaaggtgaatattaatattatttatataataaattataaaatataatatgtatattataaatattaatataatattcataataaatcaaatggcattttattattatttaaacaatacattattttaaataatatatttaaataaaacattatttttaatatttaaataaaacattattttaaataatatatttaaataaaacattattttaaataatatatttaaataaaacattattttaaataatatatttaaataaacaacatatttcaatacaatatgtaatattatttttaaatgataattgaggctcataaaattaggcagaataataattctagcagtagaagggcttcagtttttattgatttatgagataaaatcttatatccttgtatataaactgtggatggaacacatcaagacttaagctcaagtaaactgtcagtcaccagtataaaaaaaatgctactacgtattgtgttgtagaatctatagcatactttataatagctgcaaacctatattatttcaggttctcatactacagcccaaagtatcctaggggaaacttttgtgaccccattactttccactcccaaaggatatttgctaaaatgataatgatgatgatgatgatgacgatgatgatgatgacgacaatgatttgaacttaatagctttagattgacttaatctaaaagtatttcataacattattttactgatttggccaggacaaactttcattttgcctcccagtagtcttcagcaattcagaatataggatagattgttgcccagatatgttgtagtcaagactgatttaaatctttataacatctgattgtatgaaattaaataaaagcttcccccagaccctaaaagatcattttagtaaacggtgtaactttggtgtcagcatatgtagttatgcaataaagagaacaaattataattccataatctctctccggagttaggtgaataaccacatctgtggtatagggaatggaaagattactttcaatctattctaaagaaactctgctctaaaatatatcaagcaaaagtaaaataaattaatagttgattatcattcattcaataaagctggtgtataattagcaatctacctgaaatttccccgaggcatattctatgtgttgctgttagcattataaaagtgttacaataaaggatgctgaaaagaaattttcttccttcttttagacatctacccctggagaaagagcccaatgagaagtaatctctgaagcccagatttcctaaggatgaagcttcaggagaggccttatcaatcctgacaacaaacttttctcgtcaatttagtttcatttaatggaagttttaaatgtgtaaagttcagaaggctattaaaattggttccagctatctaagatacacacacaaccacacacgcgcacacacggtagagataaatatgttcgaaaatccagctcaatgttactagaaaatttgatcagaatctggtgaaataaatagtaaacttactaaaaatgccaaatatcccagaagctgcttaacatttgatcaaaagctctgtccagtcaattcctgcttctttcaaaaatactctgctgaaaagccaaaggagaaatggggctggtaccttcaatatagagaattccaagtaagattagatcccagaaggcttagtgtggctttctaggactctcactattaggcagtaacctaccattcacctctgtttcccagattcaccttgttataccttataacttaaaatataaattccaacaatgtactgcactcaaaaaaattatttctcaatttgtttgctcatactattgatttttttctagaatctaaataattgtgaattaactatgatagcagtatgcacaaacagtaagtgaaatcagacctattaattctgagaggaaggaggtgtcaggattttcacagaagaagagcactaaggccaggcgcagtggctcatgcctgtaatcccagcactttgggaggctgaggcaggcggatcaggaggtcaggagttctagaccagccagacaaacatggtgaaaccccgtctctactaaaaatacaaaaattacacgcctgtaatcccagctactcaggaggctgaggcagaagaatcgcttaaacccgggaggcggaggttgcagtgagctgagatcgcgcgactgcactccagcttgggcgacagagcaagactccatcaaaaaaaaaaaaaaaaaaaaaaaagcaaagcactaaatctcgtatgtgaaagatgagtagatttttcctaacaggagcaataaaaattagagctaaaaataatttcatgaagcaaaatattcaaagaagatgaagaatgaataaagacaattgatctggtaattcacaagccaagcttcagtaagtggtaggatagacgctgatttttaagtgtaaaatgagcaaattatgctgaataaagaaaattatttaaaaattgtcaagaaataactagagacccagggaagacaattttcattttaaggcttaataatgtttgcagactgaaggaaaagatgcagtggaggatgagagaccttagcaggggattaaaatagtggagcatttttgtggcaatgccattcaataagaagacagcattggaaagaagagagacatttattcctcctaggtaggaagcaaaaagtagaaatttgtaaagaaaaaagtattgggagataaagaagaatcacaggtgtaatcctgaacatcctaaatcaaaattattgtttatgtatttctccttccagaaatgaaacttgtaatagacgatctgtggcttaataaccttctatctccagcacctgacgtatggcaggtctctcaatatataattaagatatggatctatggaggtacaataattcttgttatatgaatcactattcctgaagttggagtatattggctcatctgggaatagggaaattggcagttagttgagagaccattggaacacctgctgaaagaaacgtgataatgattcaaggggaggaaaaaaaaaaaaaagaaaaccaagtgaggaatgaccacaataacactaacttgaagtggatgcagtcggcatatttttgaaaatgttttaaatcaacaacttctatttggagagcagatgtaattacaccagacagcagagataataaataaatatcagtgcagtcacagtggtgtggccggagtatcagtgcctcggttgctatgggcagcagaagacacagatgcctctggcatcctagctggcaatgaagaaaaataaacacagaattaggcttcaggttagagaataacagaataatagaggttaggatttagacagaaaaaaacaggcttgctggagttatggaagtgggagagacgaaacaagtgaaaaagaacttctcttcttgtaatttctcatgttcaaggaaaggaaatgtcagcattcaaaattgcagagaatgagaaaacaaatgtgatgattttgatcaaggtcatgtttatgccggtgattaacagataaaatgaagagtccttggcatcataggagggactctgagccagagtgctaaaaggaccatctacttaaatgatggagttcataataagattggagtggagaaaaattatgaagcaagtactcagaaaatgagaatgttaggaggttacaggttgatggctttaaggatggagagaatatacgttatgataaacataaaaaagtggatggtggaacaaaagttgcctgaaattggcagctgtgagtaattaatctttaacatctcttccttacttaagtagaaaaagggcctccatcaaaatggtagtgagaattttatccatcagagacaacacactttcagttgcagatgagacatggaaaatattctcacacaaaatgtggtcaagaaaaggagtaatagtacttatttttctaattgaatacataataatattaatatacattatctgtaaatattcatattgatcatgggagaggtaatcagaatatataatattgacagctgaattgaaattaatatatttttctaaaaaaatgagattatgggtaatgaaccaatattggctaggtgaaaattgtctagtttttacaactagaaatgcttcctctcaaacacttatcaaaatcacaggtgtattttaggctgctatatttgccaaatgaaaacaggatactgacattcatacacacaaacatgcaagcatatgctgaaattttcattccagatgtctacaaaagagaacagataatacgaagttcgttacctatttcaagttacctctgagattccttacgctgaagacaaatattctattaaaaaagagtccttaaataggccataagaacccgaatcctttcataaagagtgaaagagtatggttatttttgataacaattattatcaaaataaattatttttacttctaaattagtactgattacatctgaaggtttttgtttctctgataccaggatttaaaattatttcagaaagcatgattagttttagtgtctgtagatctttgctgtcagtgaattaaagtatttttgaaaaaggaatatgtattcctgaaaagtgatctatactttatagaaaattacctatttgtgtaaatataggaaaacagctctaacattaaaatatgtgcatcaattggattcagagtgttgcatgaggtttcaactttaaagaagtatttataacatttggagaaacaaaattaacaagaaaaagtaaaaccaaaatattaaaaataaaggtaatattcctcatcagaaaataagaaaaaaataccaacaattgtggtaataccaaagtgattttaaaaatacattttttttttttgttcattggttgtcttgttcaattcagtcaaacataagccaacaagataagactccacatagatctttttaagttaccaagtgttgtgtgtgccgctctaactgtccatggtttctgttttttctactaaaattctagcatactaaattctgtatggtattttttctagcattatctctggaaaattagaccagtgactaatacaattactcttttagttttcatagatttgactatatgtctgagcctggagttgtttgcgtttattctatttcggagtcactcagtttcctgagtctatagattagtttttcaccaaatttgggaagttttcagtcattatttcctcaagtaattgttaagccccatatcctttttcctctcattctaggactgcagtgacacaaacattaactatgtcattattgctccagaagtctttgaggctcagtttttttttttcttatctgttttctctcgttgtttagattgggtaatctctactaatctaccttaaatcttactgatcctttcctctgtcatttccattttgtgattttgtccatatgctgagattgctatttggaatatttttacagtaccttgtttaacattcttgctcaataattttaacatttgtatcatcttagtgttatagtctattgattgtcgtttcttacttgatttgagattctcctagtccttagtatgtcaagtgactttggactataatttggacactacatgtattatgacgtaagactaaagttattacttcgatcttttacttaagtgggtattccacctgtttagtttcaaaatacatgtcctagctcacttttgttagctattgttcaaatttcaatttggtttctaaatcccctggagtccagtatcccccagtcacagttgtatgtgactcaggtgacaggactctgccccacaatcttctcatcatggactggggagacagaggaaaattacttcactgccacagaggatggtggaattcagagttccaggcacatgtccatagggaaatggcacttacacattaaaactggtcagaaatgaatggcagagtgacacccacaggcttcagtagatagcggtgcctcctgatactgggatggggtggagaacaggcttacgccccatatctctgcagggatggtgagactgcctgaataccatggaagagggagatggaagtctgagctgtgcacataagctccactggggagaggtacaacccagttactgcagaagaagggagaaagtcagaggggtcatagtctctacggggaaggaaggccatctcattcctgcagaaggtgggtagatgtgagttccacccacaacctccatggtggggggatgctacctccttactccaggaagagggtggaagacagggttctatccccagtcccacagttatagcactcattgaggtggagatagaacacattttttttcatagtattcctcttgaagaaagataagtatggttaaaatatttctgctatgctgggttaccctttttcctggtactttcactagagacagatgatacagaagagaaagggtgggagggggggagagatatagaccacaaagaaaaatagaaaggtgaataattcctgataatattagatgaggttatttattaagacctactttacacatttactacaaggtataattgacaaaaggtaaagatcatttgtaatgagaaactttctgccgcttgtataatacagtgtctgtactttcaccaatagcttctctatttaacattatgtggttctaaataatctttcaaaacacatactaacctgtttctctgtaatatcatctcacagacagatttaaggataagttaagtgttttaaaaatctatttatattaaattatataagaatggaggcaggaagacagagcttggaacattatctacaattagtgtcttatattgccatggtcagaatgtttgtgtcctcccccaaatgtatatgttgaaacctaattcctaaatttgatggggtttagggaagtgatttggttataaaggtagcaactgtcatgaatggaattagtgcctttatatggggctgaagataccagagttcttcccttctactctgtcaggagatagcaacaagctggctatctgcaacccagaagaaggccttcaccaaaactcaaccatgctggcattctaatctagaacttccagcctccagagctgtgacaaataaatttctattatttataggtcatccagtctatggcattttgttataacagtccaaactgactaaaacaaccacaaaggcagaaaatgctagttttctactaaatggtcataaagaattgaataagtgatcaaaaaaacatgagacagctgtctgtaaatttctgtacccccttcctccatcgtaataaaaatttttagctctacatacagatacaggaaataaaaaatactttccaaatttgcacctgggcatagccaagcaactaacacttgcattaggatgtgggtaatgggtatgcatctgcattccgggagatgccctttgataaggtgtgccatcctttttttctcttcctcttctcacttgttcatattgaacactgaaggggcagtatagcatcttgggaagcagcagagttaccatatagacaagtagagaaaacttttgactttgcagagtggggctgtgttgactgcttgacattttacaaaagagaaaaaatgaacttctatcatgttaattctactcacatttgggattgtctcgtgcttaaactcatagccgaactaatacagaaaggaagagagcatgaagaagtataacatttcttacagcttcagcccagtctatccatatgagcagctgataagtctattgaatcatttcataccaagtcacagaaaaaaaaaaagtgtttttcaattgttgtgtggcagtggggagaggtggtaagggggatatgtcacacttcatttgttttacaagtatttaagaaatatgtccacatatttgatccaatagtgtatttgaaggagagttaaataatcaatatttgaaatccatcatttcttcttgagcatcttatgtaattctaatagtttgcaaaattgctaaatatgagtgaactgatacaaaggattatcttttcttaaactagataagtgatgatcctaagatgatcaatgtatgtcagcatggctatttcaaggaaattgtttatgttgataaaaagctcagacctaaacccagcttgaagtcttaagtattattgagataataaatgaagaaattcatcatttaatgcatttcataacaaataaaggaaactattttgcttaatgggtctactaagtaaaatcccacagaaagctacataggaccttgacatgtgatatctgtttatggtaaaaagaatgtaataaattaaaatctgatgtgactatattcatgctttttatacatttatgaaataaactatagtaaaaacctaaatttaaaaaccgtatttctaaagttagattttttagtattaagtgttgtcatgatataataaagcttcaatcagtttgatttttaagtaggtgtgaaaatttaatattataaattcatatcggaatgaattatttatccccagggggatcacactcacattgaaaaaagaagttttactgtaatgtggaattacttactattttcttccgaatatgttataaccgtatttggcatgtttcaaagttatatttaataaagaaaatgcatgtttctatatatgctgctatgaatacaaagtgcctcaaaacttactggcttaagacatctctatttcctaatgttccaatgtgtcaggaacataagaaggaatcagctggacagctgtgccctgtagtgttagcaccattcactctctctcttcacttcactggaaggtagaaaaagttcactcacatgtctggagcccatgtactccttcatgtgttctcttcctcaccatctgggaaaattgggcttcctcacaaaatggtggtcacctggatctcttacatgacatctggcttccaaaagggagtgtaccaacataggtgacacaagaagctgcaagcatctttaggcccaaccttgagaggtacacaacgtcacttctgaccattatattggtcaaagtcagtcttcaggcctgtccacattcaaggggaatagaaaccccttatttcaatgaaaagtggcaaataatttgtggccatctttagtccattatgctatttagaccatatttctgatatgaagttaaacatataaagaagctactacctatatttataaattagaaaatggagaagaaaaagaactttcattataaaattgtcttgccaatttctaggctcctttaaaaatattgtctatgaataatatgaaagtttcagaaagctgctattagaatttgaagagaatgctgtaagtatatggtttaaatagtatcttcctaccaaaatgtcttaaaaagtgacgagagtaaggaagtttattgaactaagaaaaagaaaagccttaaaatagattggccagtttcttcattcatgcgattattttttcatttattcattcatccaacaaatatttcttgatatcccattgtgagcccagggattttgttaggcaaggaggctgtaacaatgaaaagaaaaatattgttttgttttcttaactgtgcttacaacttaatgttacaaattactctaatgcatgagattattcagctgaagttttgataatgtaaaacaacaaaattcttcgtataatctgtaaatgaattgtatgtgaaaatcattatataaaacaatgaaatacaaattcctggatgcatttagttattcaatcaaataagcataatttaagattttgttatatccctagtgcatcctaaatcttcaggccaatgcgtaaaccatgttttcacaaaaacagatgcctcccagcacacaggacagctacagctgctctgtagctccacgtgggaccgtcttctctttgcttaccagcccatccccagttccaagaaaacatgagcttcttaaaacaaagttgaaaatctagcggctttcgagtcagctggcagtgtttctgcatttttaaagcaggcttggatatcgggggcagcttagtgttcactctgtaactgacctctctgagccaagttcagcgtggtgtgagttatcaaacctgacagccttttggcaagcctttgaaggctctcaggccagactcccttccaagctcagctgggatcaattaggataaataatagttcctgcaattgttagtttctaccatgctttttaaaagtatttagtgtgcaataatgcaatttatggcttaccggtaccacactatccattcaaaacaaaataagatcaaatcgaaaggttaaaatgtcctgagagttgcagaacgatacgctgaggaaaaagtaccagagaggccaatattttgaccattcttttctctccacatttatctaaaacataagtaaacataaatacaaaactataagatttcttcaaaatctggattctcaccccaacagcaatattttgacagtctggttaaaacataaaccataaatacacacacatacacacacacacatacacaatcaaggacttttaactgccctcagcaaccaaagagatctgctagtaaacaatgcggatttttacttctagggcaaaaaaatgaatttaagctcaagctactggtgaatagcaaacggaaggtactctatagaagctaacagaacaatagcaaatgataattttctatagcaagagtaatgccatattcaataatgctaatgttctggcttcatgtgaaacaagttttgcttttactgggtgtttctcttcatgtggcccagggcaaggtattgcaactatttcatgctgaactttaaaactcaacggtttgcggccgggagtggtggctcacgcctgtaatctcaacactttgggaggccgaggagggcggaatacgaggtcaggagattgagaccttcctggctaacatggtgaaaccccgtctctactaaaaataaaaaaaaattagctgggcgtggtggcgggtgcctgtagttccagctactcgggaggctgaggcaggagaatggcatgaacccgggaggcagagcttgcatctcgccactgcactccagcctgggcgacagaccgagactccgtctcaaaaaaaaaaaaaaaaaaaaaaccaaaaaacacgcaactgtttccaagaggtttcttttttgacctcagttcttcagttgctactggagtcatgaaactctcatgtcacttctttaatgtaggtttgacttcggtctgtcataaaatgttacttcttgtttaaaacaatgtaagttaaaatgttactctacatttgcctcgcgttttctgcttcacttggagtcttctattttggcctcacatgcttaaattttttacaagcaagatttattgttaataggaatgtctgggtttttgtttcctttttcattcggagataaaaagttatttgaagtcctattatagaaaacttttacataagtcacaagaattaagaatttttttccaggtagattttcccattaaatgaatatctctgttaatttagaatgatagtcaaaaatggtatgaatactgtggataaaataatttaataatgtttacatccaaagagtcccttgaatgcaattgatcgttggctcctaaagtcagctagagtactctttcagtaatgtccctggtaactgctaaggatacagtaatgcttagatatgcatctttgctcttccaaagctaactactatgcctagatgacttatgtgctcctccagctcaacctctaaatttacacagttgttggaactgcgattgaatgccaaaacacagtccattttgtagagcgtattttaaaatgagcacaatatatcatttggttaagtaatgcatagagtatttcactgttcttcaatataaagactccgaatatggggtgtgtgtgtttgtgtgtgcacacatgtgcttgtgcgtgtacacactattaaatgactctgaagaacacggtgtaacatatgttcaaattatcttacagatctttttttattgctgacttgtaattgaaagctaatgaaaaatatactaccaaatttagggtagcaaaaatatttaattctgcttaacttaacaaatatttatagccttaatattttcacagtttgaaatatgggagacacgaaagatagaaggcttagtttctagtcataagggaatttagaattctcatgaaaattttccatagaaaaataataaagaagtagcattaaaagatggctaataatccaaagtgagtgctcacaaatagcagttaccgtagcaggaagaaggaagggctgattatggattgacatatttatggaagatctcaatcacaaatggataattgcctctaaataatatagacatgactttagtgacaacatattgtagcatattttactcctgcaaatgatattcatcaattatgttatcttgtttatctatacaatttttcttatatttatttcaatagaaatcaattatgccctgaggataagaatctttgatgactcactatgtctactttgcacagattttctaaaggcaaacaccaatagaaaccactctatagttcaaggctaggtccagagttttgggttagaagtgtttgcttgtatttttgtcagtttgttttgctttttacataaataacattatttttaaattaggcatatttttctttatttttttctattaatgtaacttcaatatttttaattcattcttcagtttttcttctattttttatttggggcttagtatataactttcaaatttacatgtttatataaatgcaattaatttaatattctttaaaaatctttcttctagtgtttcagcattatcattttactatttaatgctaatatataaaacaaaattaataaaattgtaaatctatgatgttacatcttctgcaatttactttaaaatagttcaaagtaagcagcggcatgtgtataggtagaaaagttaattgcaatctacaacctagagcttttagatcacacttcaaagatgttatctgaaatccacattctataattagctaacaaaagcacataaaatattactaacttaatgtacaccagcaggtagtctgatagtttgtctccgaagatggcaccaaaggagccagccttccagattctgtgcagtttttgcccacgaagaatggtgagataattctgtacctacactttaagaaaggctattgatttttaattttgagatcttgggaatgttgagcagccataaaagatgtccagttacacctgctggagatactgtgtgagataccctaagaccatgtatattagggttttatagaaggacagaactaataggatagatgtgtgtgtatatatatatatatatatatatacacacacacaggggagtttattgaggagtattgactcacacgatcacaaggtgaggtctcacaataggccatctgcaagctgaggagcaaggaagcccgtccgaatcccaaagctgaagcacttgcagtctgatgttcgatggcaggaagcatccagcacaggagagagatgtaggccagaagactaaaccagtctagtcttttcacattcttctgcctgcttttattctggccgttactggcagctgtttagattgtgtccacccagattgagggtgggtctgtctttcccagtccactgactcaaatgttaatctcctttggcaacaccctcgcacacacacccaggaacaatactttgcatccttcaatccaatcaagttgacactcaatattaaccatcacaccatgtaacaaagagaaagacacagttgtctccatgttccagttgagcttgtaacgacagccaatccaggcactttctcaatgcaactacatgagaaatcccaagagaaacaagcaaaaaaatgaagcgcattgagaagaaccgaagacttagcaataaagaaacaagttaaagtagggagaaaacaaacaaacaaaaacaaaggaaacaagccatcattggaggctgaatgcattactttctcagcctgataaaatgtatttgcagaaaaaaaaaaaccttatggtgaacatacttaatggtgaaaaagctcatcctgcttaagatcagaaacagggcaataatgtccatctttagcatttttattcagcactgcactaaaagacttggccagtggaagaaggtaagaaaaaaataaatcaaaacaatacatatttgtttgcaaatggcataataatttatatacacaattttaaataatctgcaaaatatatcttacaacccataagtaaatttaataagattacaggtatgtggtaaatatacaacagtcatatattttaatataataataataaacaattacaaaatgagatacaaagacacatctcttaaaacagtaccgtactgggttaaattctcctgcaaattcatgtcttgtgaatgtgatcttattcggaaatagggttttggcagatataatcaagttaaaatatggtcatgctagagtagggctcgacctgataaaaagaaagaaatttggatgcagagacaccagcacagggagggaagaataccacgtgaatacggagactgagattggagggatgagttgacaagccaaggaagacaaagattgccagaaaaaaatagaagccagtagaaacattatgttgtttaatttttaatttttgatttttatgggtacatagtaggtgtatgcatttatcagtacctgagatattttgatacagacatacaatgtgtaataatcacatcagggtaaatagggtacccgtcacctcaggtacttatcattttccttgtgttacaaatatttcaattatactgttttggttatttttaaatgtatgataaattattgttggctgtagctaccatgttgttgtatcaacaggtattaaccctataaacctgtatttttgtacccattaaccatccacattccccactcccactatccttccaagcctctggtaaccatcaatctattctccatctccatgagttcaattgttttaatttttagctctcgcaaaaaagtgagaatatatgaagtttgtctttctgtgtatggcttatttcacttaacataatgacctccagttccatccatgttgttgcaaatgacaggatttcattctttctattgctgaatagtactccattgtgtatctgtactgcattttatttatccattcaattcttgataacacttaggctgctttcaaattttggaagccaaaagaatttttgaggaaatcaaccagacaattgtcaaatttatacggaaacacaaaggaccttcaatagccaaaataatttttaaaaagaaaagattttgagggcctacaggttatgattttaagattataaagctgtgttataagacaatgcagcaaagcattagaaaaaagatggaacaggatataactgtattagtctgttccctcactactgtaaagaactacctgaaactgggtaatttataaagaaaagagatttcatttgttcacagttgggaagctgtatgggaagcatgtttggggagacctcaggaaactttcaaccatgacggaaggtgaagggcaagcagtcacgtcttacatggccagagcaggaggaagagagagtggggaggtgttacacacttttgaacaaccagatctcataactcactcgctgtcataacaacaacaccaaagggaaaatctgtccccatgaaccaatcactccccaccaggccccacctccaacattggggatttcaatttgacatgatttgggtggggacacagactcaaactgtatcaacacccaaacacatatagtcaattgcttttttgaaaaagttcaaggacatttaatggggaaaaaagtatcttcaataaactagtgctaggacaactgaatatcagcctaaaagttgtgtatctattcttacctcaccccatctacaaaattaactcaaaatggattatagatttaacatatgagctgaaatataaacttaacaaaagaaaaggtaggcatatatctttatcatcttgtatagcactgaccatgcgagaaaaaagaataaattgaccttatatgggacttatatattcaaattttacaaaagaaaaaacttggccgggtgcggtggctcacgcctgtaatcccagcactttgggaggccgaggcgggcagatcacgaggtcaggagatgtagaccacggtgaaaccccgtctctactaaaaaaatacaaaacttagccaggtgtggtggcgggcgcctgtagtcccagctactcgggaggctgaggcaggagaatggcgtgaacccaggaggcggagcttgcagtgagcagagattgcgccactgcactcgagcctgggcgacagagaagagactccgtctaaaaacaaaaataataaaaaataaaaataaaaaacatattaataatgagaaagtaaactgtgatttagaaactggacaaaaaatttggacaacaatttcatacaagaaggtatgaaataagtaaataaatataaacatacacaatataattggctgtcaggtatacagaaattataactaaagtgaaatattactacacaaacagaaaatctcatcaaaacaacttttgatgatttgacatataactttttttactttaaaatggtgcaaaagcaatacacattcagtagaaagcagtagaaaaccctcttgggatgttggacagtggcagggagctaaggcttccagtcagccacaagatcaccagagtaaacaagagatactctacagtttgctgtgttgccagatgattttgctcaagtgtagaataatgtaagtgttgtgagcctgtttaaggtaggctaggctaagctatgacgtttgatagttaaagtgtattaaaaatgcattttcaacttgtgatattttcaacttaacaatggatttattggggcataaccccatcgtgagtcggggagcatctagtactaaaatggctaaaagtaagaccaacaatatcaggtgttagaacggagagcaacaggaaaacaccaccaaagaactacctgaaactgggtaatttataaagaaaagttatttataactcataaactgctgatacatataaaatatataaaatgaaacaactaatttgcaaaagacattgtggtataatcacacaaccctagttggaaataaaagatatgaattactgataccccaaatgacacagataaatctcaaaagcaccacgctgaacaaaaggagtcagacacaagagcacacatctatttgaatccatttacgtgacatctaggacaggcagaacaccagtcgacaatgactgaattcatatccattggtgcctgtgttgaggactggggaagattgtctacagaagagcataaaggaacactttgagaagataaaaaagatctaattttcaattgtggtggttacattgatatgtacagttagcaaaacttatcaaagtgtactcttaatgtggtcatttaattatatgtaaatcatatctcaataaaagtcaatttctttcaaaaataccacaaaaagataccaccaacagggagtagaatgactaaaatttgttaaagatttaccataagtcctttctgttggagattatgtgcagtaacaagaaacttttgtatattttgactgaaggtataaatagcacagctactttggaaaacaattgttctatttaaaacagtttacataatgttaaaaataaaaatatcacatgactcagtaatatcattctgataagaaaaataaaaatgtatgtatcataagatctgtacaaaaatgttcataacatttcaaatatccccaaactgaacaccctaaatgtccattaacagctgaagagataaagaaattatactatattcacataatggaatattactgaactataagaaaaaactcctgatatatgcaactgattcatagaggaatcttaaaacattatgctgaggaaaaggagccaaacacataagcatacaaattaaatgattcatatatatatataactctaaaacataaaaactaaactttaacaataaaaatcataccaaatccatacaaaaacctacatatgaatgtctataccagttttgttatattttattttgttttttgagacaggatctcactctgtcacccagaccgcagtgtggtggtgcgatctcagctcactgcagccttaacctcccgagctcacgcaatcctcccacctcagcctcccaagtagctaggactacaggtgtgcgccaccacgcccggctaattttcatacttctggagtcacgggattttgccaggctgctcttgaactcctgagctcgagtgatctgccacctcggcctcccgaagtgctgggactacaggttgcgtcaccacaccctgtaacggtttcatttttaattgtcaaaactagaaaacaaccaagatttccttcagtggaggaacggagaaataaacaatggtatatccagacaatgaactattattcaacttaggggaaagaagaagctatcaagcaaaaaataaaaaataaatggaggaagcttaatgcatattactgagtggaaaaatcctatctgaaaatactattaatacatactgtatcattccaaatatacaacactctgaaaaaaaaaacaaaactatggtgcagtaaaaggatctgtgccagggatgagtagagaaaagagatgaataaaaagaggtgaataagcagaacacagagttttatggcagttaaactactcgaaacgatacttcaatggtagatacgtctccctgtatatttgtcaaaagccatataatatataaaccaagagtgaaccctaatgtaaaccctgaatttggatgatatgatttgtcaagttagatgcatcaattgtaataaatgtaccacagtggtagggtatattgataatggaagaggctacgcttatttgggggcaggggatatgtgagaactccctgtacttactgcttaatatcgttgtgaaactaaaactgttaaaaaaaaaaaaaaaaagcctatttaaaaggggaaaaatcattttacggttgcctgacagaaagcattagtcttttctacagagtcatgaatgacacttttgggattatgggaatgttctaaatgattagggtagtggttacgtgagtgcatatattttttaaaatttacacaaccatacactcaaaatggatgaattttaattacacttcaataaatttgattagaaataatttcaaaggcatattttagcagggggggcattaggtagacttggtgattgttgacttagaaaaaaaaagatgtatttggaaatagcaagaatacaaagctcacaagctgtgcgtggtattggcagcactcttatccccaatgaatgaccctcccttacgcatgcacttcgggctatatctttctttaaattttcatcttttgtgggtacatagtaggtgtacatatttatgggagacttgaaatattttgatacaggcatacaatgtataataatcccatcgagttaaatgggagtatccatcacctcaaggacttatcctttctttgtgttacaaacaatcccattatacacggttagttattttaaaatatacaacaaattattgttgactgtagtttgaatgagatctttgggccatatctttgtagtgctcgtccacttcatttgacccatgttaagacagtcaatgtaatgtaaagttgaggtttgcattacatttctgctctggcactcttatttggctgcacttactcactccaatgactctgcactcaacaaaaagaaattcattaggctggaattctgtatagaagggagacaggcctgagagagctcccttttcctagccatcctagataagtcatttgcagatcatcccctagccatttaacacattcacatgtgaggaaaagatttccccagcagagtccagcctaaatgttgatccacagtgaattcacttttaggatggtttttatggtctatggagtacttcatatcaaaaataatttttaactaaaatgatttttatgtaatttatactttctcctagtaaacatattttgacattataatttaaaagagatggactcaagtgtttaatgggccaagattttcctatataggttagaaatttagggttagaaaagactgttttaagccacgaagttaaatttttgaataaattaataccaactgtgactcatattgttggtgtattttgctttacatcaataagttggtagtagatgtatgtggagttaagtcgtggatgattcttcggtttaaattattttcttgtttctgtgggatcccatgactttccagacatcactcacctctattatctttatttatattttttttttggcttatttcaaagtaaaatggttatttcttaccctagttgtttccctccctctcttgatttctattccctggccatgctttcacctgatgaaacatggtccagggctaggcaaaattctgtgaaaaacagtatttggtgtaatgatatttcccttgaattttagatttctaagtagagagccttgttgttaatatcttcttccagtggaatccattagactaagaagtaattataccttataaaataaaaatactatcaagttcaaaccaatttttttttctattttttgataagaggaaaaaggggggcaggcattatttttaacctgcttttattatgaaatactcaaagcataatagctgatgtgccaaataaagtctttggcagatgattattaaaagcacatggattcaaagggcttgtaggagtggaaaaatgacaagtcaatatcagatacatcatcttcttatgtactttactcatttctattacccggaatcattaaggatagtattcttaaatgtcatgctgcaaattaaattttatcataaacctgattttaagcctttagtattagaaggaaaagcaaaaactattattttctgaccacaatactgaatacaagtattaccattattattaacatatgtagtggtgattgagaaattttaaaattagttttttgtagtaagctacgcttttgatttctcaagtattttctactgcttcatgatttaaatatttgctcttctttaaaacacccacttaaaaaaagttaccacttctagaaatgtttaacttcaagtttgtcacttttaatacttgcccataccactcaaacttagatttcctatctggcctactattcctccaaaaaaacagggtataataagaagtggttgtttcttctgactgaaattgaacatagtatacaatacagtatccattgctcaccaatataaccaaagcagaagtaaccacaagctacctgggcccttcttgttggcctgtcagaatatatgttactaccatcccacaaaccaccatataaactaacttcagcatagtaataaagtcaaccaattctggtcatctgaaaggctttgaccctaatcctgatcatgccaggggaagggatggatggtaaggtaacaagagcagaggtttgtttctgtcatatcaaatggctgttagagaaaaagttaggttcttctgtaatcttgaagcttagaagctccacagcttgagggctgcactcttctcccagagcctttcatcctaccctgccagatctcctacagcactggaatgagtgtggagcttgtgagttttacccagtgaatgctgcactaagaacctggggtggaagaaaggtgctacttaaccattcattgctctgatttgtatgacttattgtttattacatatgtttcattttttattgatttcataatgaaagcttaccttaaaatttatactcctcccatccatttttcttcacttttctttttttctattctatatatttaacctcatcttttttcaaattgtgagtattttaaacaaagagttatgtatgaatgagagaaaatgtgagaaagagccatgaaactacagatactataaatttccattaaaaataaaatattttattagttttattctggtgttgtattgtagttttactgtaataaaaccatattatcagcaacatccaatagcattagaataacttaagcctgcaaagatagaaaatatagagcacaaatattccacggtgtttaataaattattccaaccatccatgtttaagccaatgttattttaataagaaattttcagatcagctatttacaaagcataaactattcccatcacttttattccacgaattgaccttcacagtacagagccatttccacattcttttatttctcttggaaaatatatagtgattatcaaggtagttactgcaagagtaaaagatgagaaagttacttgaatattacaaaaataaagtatcaatacatagtatatgtaagttattcttataacaagcacacgtaactttgacaaatgaatctcaaaattgtcaatggaaataaatttacatcaggtgtcctttttcaataaattatttcaggaacgtgaactattgtattaaagagtatattaattcatccttttttgtcattgcttttccatgtttttattgctctacctttctttgagaggctaatatatagaaattggaagctattttccaatgggcagcatcaaatatcttggcttatttgctgttggcatggggctggtcacatgttcatgtttttcttggactattcagctgcccctccagctttgtgcaacattgttttccatgaatgagctttgattaagataatttcatagtttaaactattatgttggagaattaacttgtaacaattttaacataaaatgatttattataatctcaggattgggtattggtcgaggtttctatgtcatctccaattgattgtagagatcaatcataaagaatgtaggggacaagcaatagtttccttcctcgactatgacccttcctgtcactagaaaagatggtcaaggggaaagatttaacagaataaacagcatagaataatcctagagtattttgatttaaattttttatagtaaaaataaacaaatgtagaaatgtgtatttctagatttgcacaaaagaacaaacaaaatttatataaacgcctacaacaataacattatttgcttatattatatctagctaggaattcataatgagtcttaagaatcttttttccaaacactgatattctaactctgtaaatcttgattttgtttaaaatttcaaggaacagtttggatattttcgtacttacacacatacttgtgtgtgtgaaataaaatagtttaaatttttatctcacacatgcacatacacaaatggatcatgtcaagctttgtcttagagagaaggaaagggagaagtgaagagaatatgaataaaactttctagttctcttttgattggaggagttgttttaatcaatgacttcctagagttccacttaccaatttaataaggtcaatacttaataaagataattaaatattccattaaaatattaaaataatttgggcgatagtatttcctacttttcaaatttggctagagtatacttcattataaaataatgattgataagcaacaacatcacaagtgtggtatattgaaactgcctacatcaaagaaatagaagatttatatgatgactttatgacttaaaacaaattcctagttataatttgaaagagaaaaaattacgttcatttgaattaataattaattactattatgattaatccatctgtaattgaagtcaaggagaagggaaacttgaattactaaaagtcaaaatattagaatcgccataacaaaatatattttaacaatatgccatactgattttaattatatcaatacatatttttctatcagaagtcctaagaaatgtcttcgtatcactgaattgcattttatttctaagtactagcagttgtttgcaaaatttgtcctattcagattttaaattccccctgtagtctttctttccctaatgacttaggcatatactaaatgtgctatacatatactgaaatgccttcataattcaaaatatgcattatgaatctcaactattaaagtgtgtttaatgtacacataaattctcaaggactactgaaatatgtgaagttatttgatcctctaataagtatacgaaatctccatgttttgtagtgtatctgttttctgttttatcggtcaattcttaaccgtccattggtctgttttttataacctgcccttttttgaaaaagaaacaaaaaagccatgttggctcagtgaattctaattttatagattatattaagacagtagagactgagggagccttctttctttatagactaacgcaatgtaataaaagaatctggaagatcactaacttgctctgtgatccagacaaagttatttaatctacatggctttgtttttttattgtaaaataaatagttctaaccaataatgtctctaaagtaccctctttaacataaaattttatgatcaaactttatttttcatttttttatttgtatagatttaagggatacacgtgcatttttgtaacatggatatattgcatagtggtgaagtctagaagtgatataaatgttaatcagaattaatacatatttttgctcctttgagggagttaaaaaatgaattaatttacatattttaaaacaatgagtgcagaaacaaacaataatttgtatagtttactaattaatgtaaacttaaaaaggtaatataaaaaagcattcccaacttaagagatcatctgatgatagtcactatttcaaataattttgctatgttttttagtttcttcttttaaaagaaaattatttttatgagtacatagtaagtgtatatattaatgggggcatgagatattttgctacaggcatgcaatgtgtattaatcacatcatggtaaatagggtttccataacctcaagcattcatcatttctttgtgttacaaacattccaattgtagtccctgagttattccaaaatgtacaacaaactattgctaactttagtcatcctgttgtgctttcaaatattagatcttattcattgtatctaactgtatttctaaccattaactatctccattttccaccccaacttcccactattcttttcagcctctggtaaccatgattttgctatttagatacactattcatctttgccaactcactcatgctggagctctatttatactcccaaacatagtttatccaataacagcaaaatgtcatttagttgttgaactacccaatccccacataaatttttgtcaaagttgcatttttaaaagtgattgaccattgatttttttttcaaatattttcttcacttggatcacaagcaacaaccagccagtggaaagttttgcaaaattcttggctttctgtaccaacctaagagcagatggatatttccccactacagatgaaacaaatgtttctttttggataggttttcccattaaacaaacttttgccattgaaatctatgtttagatttggtccgttgggacatcacaaagttaaatagatgcttgctgaaatatgtttcatttttgctgactcagaaacatgttaattgttctgtgaatttagtaacaatcaacaagtattattttaaaataattactttgtcaaaagatgatacttctgatgtttgattagttttggcatatgaggtaggcttcaatcttactgaaattacttaagctatctgcatttcttttccctgaatatgaatgagtcttttcaacgtttttggtgatgaacaggatcacactctgctcaaatctgttcaaagagaagtccaagactagcaaaacacgtaactgttacttaatttaaaaggcaaaacaaaacaaaacaaaacaaaatctttcaaaagttcacacctatatttattttgggcaatttgccccttcttgacctcagtttcctgtgtgtaaaatgatgagtttgcattaaatgatttgcaaagtctctccagcccttaatttctaggactctgtgaccccatttacaagcctcactaagctaatctaccacagatgtattcttactcactttcagtgccaataaacattagcattgggaaacagctaataacaagctaatgtttctgatggtgcaaacagagattgatataaatgaaagcacagtttggttctcactagatagaactgaatttgtttagtcattctttttgttacccattacatataaagttggaattcccacctaagttcagtgtattatgcctgttctcttttccatctccactttacttttgattgtctatcatattctgtagattcaaatgagttgagaaaagtactggtttaaggaaagaatcatttgttcttgtccacacctcatatcttctcttttcccgtacccaaatgctctgatgccccatgtatggttataaggcatatgcttcttagaagtcaatgtggttacaagttaagaatgaaatgacacatggctaaccctgcttttgcattttgccttcaacatatccattctctccttctcctttgtcagtaaacctcatcagacaaaaatatttccaatctcagaaaattaaatcagtcaagataatgctttctctttccagaaactatgaaatgtgcccatctctcttgctctgtgacttagttatagacaataagagtaacaggtaagtctgctgaagaactgtggggctggctttaccttccctaatgaagggaaccttgatatacaccccactgacttctcccttctcgttttgatacctatagttgtagtcaccatcttgtgatcataaagaaaggccaagagaaaaatagatgtaaagaaggcctcacgccattgaatagctgaaccaaaattacaacaaccattcatatctaaacttttcttcatatcagagaaaatcaagacatttgtttgtagaagatgcagtgctggacgtcctagatatccccatcaggattgagatagttattctcccagccgctatgaagattatgtgttgatatctctcagaggtcaagacctcctccagaattattatcagctgaggaatgcttccccatctaaggagatgtgtccttcttggggaaacccacatctaatgactatttggtagggaaatataacaatctgagtgactctcctcaaaacaggataactctgaagggccctctcttctgtgaggcatccctcaaacttggctggtccttgttatagataaaactcactccaactttccttctacccagagttctgcttccttaatttcccctaaggtgaagcttctgagaacactccctgtgaaaaattctaacactagtctctgtctcacagcttctgacagaaagcaaattacaatattgtataatgtacttttagattttctgttatttgtggccaaaattattattattattattttgagatggagtttcgttcttgttgcccaggctgaagtgcaatggcacgatctcggctcaccgtaacctctgcctcccgggttcaagctattctactgcctcagcctcccttgtagctgtgattatagccatccaccaccatgcctggctaattttgtatttttagtagagatggggtttctccatgtcggtcaggttggtctcaaactcccaacctcaggtgatctgcctgcctcggcctcccaaagtgctgggattccaaaattattcctaacttgcacgtaagtatacaagcaaattgggagactggtaaaactaactggcagactcccacaaaagagactttgtagtgtgatgaaaacacatgatctttcctgaaggttgggttcaaatccaggcctagtcgcttgccagcaaggtaaagttaagcaaaatatataagcctattttagtcttgttttccttaagtgttaagagaactaataatactttcattatttatttaattttataatttctggtgactaataaggaggtaatatacaatgcatccaacacatacaatcatttgttgaaaattctttgtgaggactcaaaaaagtaacacataaatagcatctaacacgtatagtttccactctataaatagtagctatgctagtggattaattttttttttttgagatggagtctcactctattgcccaggctggagtgcagtggtgcaatctcggctcactgcaacctccacctcccaggttcacaccattctactgcctcagcctcccgagtagcagggactacaggcacccaccaccacgcctggctaacttttttgtatttttagtagagacagggtttcactgtgttagccaggatggtcttgatctcctgacctcatgatccacccatctaggcctcccaaagtgctgggattacaggcgtgagccactgtgcctggccactagtgtattaattttaaaattgtatttatgaatgacacaagtctaaaaatatatttccagatttgagtacctaatagtctattatataaatagctggtttgcatttattatctttcatatttccacttcatttaaaaagtacatacatgtgacccagggtagccactgggatttatgaagaggcaaaagtggggagatttgagaatttaggaatgtcaggagtgggcatacacagagctatctctgggcaccctcacccactttgcacaggcttttgcacagtggatgattgtgctcctggaagagatccagggagcacaaagtacgagacctgcttctgcccaagaggatcagaaactgagacctatgtgggtctcaggggatggtactaaaccactcgtgagaaattcaccaccataatctcatcacctcccaccaggccccacctccaaaactggggattatatttcaacatgagatgtgggtgtgaacacagattcgaactatatcattcttcccatggcccctcccaaatctcatgtctgtcttacatttcagaatacaaatatgccttcccaatcatctcccaaagtctcaactcattccagcgttaactcaaagaccaaaattcaaagtctcatctgaaacaaggtaagtcccttctacctatgagccagtaaaataaaaataaaattctaaaaattaaaaaaaaaaacaagttagtcacttctaagacacaatgatggtacaagcattgggtaaacactcttattccaaaacggaggaatcagctaaaagaaaggggctacaggtcttatgcaaatctgaaactcagcacagtagtcattacatcttaaagcttcaaaccaatatcctcagactacatgtctcacatccagggcacactgatacaggggtgggctcctaagatcttgcccaagtgccacccctctggatttgtaggattctgccccagaggttgctctcacaggttgttatgtgcctgcagcttttccacagcaagggtgcaaactgccagtggatctacccagtctggaggatggtgaccttcttccacagctcaaccaatgagaactctgtctgtgggatctgacccacattttccctctgtactaccctggtagaagttttccatgaggactctgccacttcagcaggcttctgcctggacacctaggcttttctatacatcctaggaaatgtatgcagaggttcccaagcctcaaacactcttgcattctgtgcacctacaaagtaaacaccatgtagaagccaccaacacttatggcttgcaccctctggtgctgtggcctaagctgttcctggactactttgagccactgctggagctgaagctgacaggatacagggagccatgtcctaaggctgtgcagggcagcagggccctgggcatggcccacaaaaccattctctcctcctaggcctcagggcctgtgatggaaaaagctgccccttagatctctgaaataccttccaggccttttttcccattgtcttggctagcagcacttgctttcttttcactaatgcaaatttccacagcaagtggtcactcagcaacctacttgaattttccctgaaaatgaggttttctcttctactatatgaacaggcttcaaaatttccaaacttttacaatttgcttccattttaaatataagttctagctttaaatcatttatttgctcctgcatatgagtataggctgttagaagcagccataccacatcttgaatgctttgctgcttagaaatttcttcttcgagataccctaaatcattactcttaaatccaaagttccacagatccctagggtgggggcataatgcaaccaagttcttcactaaggcataacaaaagtgacctttgctccaggtcccagtaagttgtttatttccatctgagaccttggtagcctggacttcactgtttacatcactatcattatttctgtcaccatcagttaaccaatgtctaagatgttctagttttcttcatcttcctgtcttctgagctctccaaactcttccaacctctacctgttactcaattccaaagttgcttccacattttcaggtatctttatagcaatgtcccactcctcggtaccaattttctgtatcagaccattctaatattgttataaagaaatacctgacactgagtgatttataagaaaagaggttcaattggctcatgattatacaggctttacagaatgcactgcagcatctgcttctggaaaggcctcaggaagcttccaatcatggcagaaggtgaaaagggagcaggtgtgtctatcacatggtgaaagcaggagcaagaacaagagtgggggaggtgccaaatacttttaaacaaaataatcttctgataactcattcactatcaggaggacggtacaaagaggatgatgctaaaccattcatgagaaatccacccccatgatccaatcacctaccaccaggccccaactccaacattgggaattacgtttcaacatgagatttgggtgaggacacatattcaaactatatcactgaccttgaagccacttaattcctttatgcatgccaccatgctgtgcatgtaatagtgaagacttaattcttcctctgagtcatgagaactgcaggggccaaaatatcaaaaatcatctttcactttttatattaaaaccaaaaaacaggtttcaggagggtcatgtcttagagtctagggaaagaaatgctgtaaattttactatggatacaatgctgaccagaaaaaaaaaaaaaactgttgaaaaagtgaagctcattcactgtagctgatgtggccccagttgctgtgtaatttgcttgtaaaacaaataaattttctcttccctcaagaatttatggtctgatggagaagggaatcattaaagttctatgtagtgagatatccccaaggggtgtattaggcttaccaccactggaatctggatagatgaagacagagtggcagggaagtcgtattaaggttctgtttctgctgggagccacaggtcctcaggaagcaacaagtactgggcagattgatactgtagctgggctctagctctatacctctagaataaaggttacaaactagcaacttgaaagctaaacctggcccacagatatgttttatttggctcttacactgttttaaaaaatattaccaacatttaaaactgggaagttttatgaaaaaacccagacttctggattctgttgaaaaaaaaaatcagaagatctggcaatactgagctgacattcctatatgacaacaattggctggatctatgcagcttctctccaaaaagcaaagaatgtgttcttgcttaacacagtccccaccactccctcatattctccaatcctggacctgagcgtcatttgctatgtatcgccatttgccatgaagttttacactctacagaaatataatttttttgtagaagactatgctttaatcaagatcaggataatataaagtgagatctgaaagtggaaaaaagataaatgtccaacaatgatagactggattaagaaaatgtggcacatatacaccgtggagtactatgcagccaaaaaaaacgatgagttcatgtcctttgtagggacatggatgaagctggaaaccaccattctcagcaaactatcgcaaggacaaaaaaccaaacgccgcatgttctcactcataggtgggaattgaacaatgagaacacttgggcacaggaaggggaacatcacacaccgggccctgttgtggggtggggggaggagggagggatagcatttggagatatacctaatgttaaatgactagtttctgggtgcagcacaccatcatggcacatgtatacatatgtaactaacctgcacattgtgcacatgtaccctaaaacttaaagtataatttttaaaaaaagatattttcttatctaggtgagaaacaatcatatacatttaatgctttttaatttgcattatcgatctagccctgaatcaggggaaaatcctcactctttcttgaagtttcataaagaaatatcaatttggtaaaaagtcgactttttttttctttgagaaggagtcttgtcctgttgcccaggctggagtgcaatggtgcaatctcagcttactgcaacctccgcctcccaggttcaagcaattctcttgcctcagcctcctgagtagctgggattacaggcaagtgccaccatgcccggcttttttttttttttttttctatttttagtagcgacagggtttcaccatgttggccaggctgttctcgaactcttgacctcatgatccaccctccttggcctcccaaagtgctgggattacaggcataaggctccctgcccggccagatgacccttctttaactacataatattgactatggaataggccttggcatgtaataagcgaatgaatgaatgaatgaatgaatgaatgaatgagttagaacagaaaataatcgaataccaacccatttctcacaccgcataaatcatgaaggttctgaggaaggctctctgatctttaggttgtaaaagaaacgtgtatattttaaatctctgcagggatattgacacctctccaccagctgagaacaccacacaaaatgtgatggatctttgtttccaaaagatgcccattacattcttttataatatcaaccaacagggactttgaaggacatgtcccaggaatttataattgaacttgtcctgttcagttttttttaaatcaagagctaataaagacatggacaattttcttaacatatttttaggtgacagtatttggggaaagaatgcctccaagctagattgcaggttcagtttccaagactagaattttaaccacaccactgatttagtttgtaggttcagtccacaccataaatggagatttaaaaaaataaaatacaggaaacgagagacacgactcaagaagagaacccttaaaaaatatgtggggaaaagcccaacagaaatgaatggtgtcatatggccttcaagaaaacctaaataatgttaaggtattaatagacatatagaatttaaggctgggcatggtggtttatgcctataatcccagcattttgggaggcccaggtggaatgatcatttgagcctagtagttcaaaaatggcctgggcaatatagtgagaacttgtctctgcaacaaattaaataattaactgtgatggttagtattgagtgtcaacttgattggattgaaggatgcaaagtattgtttctgggtgtgtctgtgcaggtgttgccaaaggagattattatttgagtcagaggactgggagaagcagacctaccctcgatctgggtgggtgtcatctagtcagctgccagtgtggctagaatgaagcaggcagaagttggaaagagcagacctgctgagtcttctggccctcaccgttctcccgtgctggattcttctggccctcaaacatcagactccacgttcttcagcttttggactcatggacttacaccagtggtgtgccagggcctcttgagcctttggtcacagactgaaggctacactgtcagcttctctaattttgaggttttgggactcagactgatccaccactggcttccttgctcctcaacttgcagatggcttctcacgggacttgactttatgatcatgtgagtcaattttccttaataaactccctttcatatatacacatattgtattagttctgtccctctagaaaatcctgactaatacattagccaagcatggtggcatgtgactgtagtcccagttgctcaggagggtgaggtgggaagattgcttaagcctgggtggcagaggctgcagtgaactgaaaccaaccactgccctccagcctgggtgacagagctcaaaaaaaaaaaaaaaaaagaaatgtaaagtgctagcccttccacactgtgtacgtgtcaaaccttttccagttggtattttcacatcttagtattgcaaatgttggtatgcatgcacatgtgttgtgtgtgtgctggtggtagtggtggtggtggtggggtgtgtgtgtgtgtgtgtgtgtgtgaaaaaggcaatacaggaatggcagaagcagaaatacggagtcaaaatcatgtcataggaaaaacattatgtaaattgggatttattacttgcacaaatgatacgaaagccatgcataagttttattcaaaaggatgattaggtttagagtaattggatctatttcctctgtagctctgagaggtaaaagtaatattaaagaacaaaagtttaacataagaaattttttttcaaaatggaatcatcccctcacctaaaataaatagataaaatagactatcaaagggaaatcatttgttgttactacccttttcttgcccaatcgaggcttggagaagtatcagactatatgatatttaagatccctcccatcactgggaacttgtcatttgatggaaataaaaaatgaaagaaaaatgtttggtcctcaaccttttaaatccagacacttgatgattgttaccactttacgtcagatcgaccttactttcatggaaaattgtcattttttggccactcagcatccaaacgaactttctctttctgagatatttactcccattacctcccaacagacttggccaataagatgttcctgcctaagactttgaatctggaatggggaacacagagaacatgagcaacgaagaattattcacagcacagcacagcagtgctgacagcatcgacagtcctgtggtgccagcaagaatccaaaagaagtgtcctacataaattcccttaatcactgaccatttaatgaggctgattcagcctcatacaaattttgtatgcttcttcatacaatttttaattgtgctgtaaaagttaaccagagacaatttctgttgcttgcacacagtaagttgactaagcaaaaaaattcaggagagattattttatagaagtcaatgcaaatgcattaatttacaagaagtgaaactgcaagttcactttgctgccttatggccagcatattctcttacaagggaagtctatatggcaatctgtgttatgatcagaagatttgggaaagatggaatctgtgagagagttttatgacacacggttacaactgatcacaggatcaaacactaaaactccaatatatatatttattcttattagcaaagcttttatgctatggaggaaaaagaaaaagaaataagaaattctgagtttctctaaacttccagtatgtggatgagttaaaaactatgtcatcttggattccccattttaaatatttcataataatgcattataattggtacatgttaatatcaattttttcttttgctgtttttgaagtggtgtgaatcacctgtaacaaggtttccttatcatccatttaattattgtcctataatatacttttcaatacagcaactactttttatgttttgggattacttttactattgttagataaaacctatggttgattgtgtgcctctagaagaacttcaaaagtacaatataaatcttgctaacaataactcattatggtcagtggtttttcaggatagttatttatctcaactactcatgatgtgaatgtcttttaaaatttgaataattgccctctctgtcagatacaatattattatatttttactgattacattaagaattaggcaagattaaaattttctttttgcaccatcattacttcttaagaacttaactgttgttgaacaaatagtacgtgtgtcagttattaaatgtagtctaaattcatgaaataagaatgtacatatagcatagtgggaaaaacacaggttttagaatcatataccatagagttatgtttcagtagtgctactaatgtattctttgaccctacgtcagtcagcaaacacaactgaaatcaagtggtaactctatgttcctcctttgtgtaataagtatttttacatgtttgagatcaaatgatatagtgtgttaaaattatttataagctaaaatattttataaataatagctgtacttattaaaaattagagattaataagttgttacataaaacacacgtaagcgattcaatgttaggaaaatatatttagctttctcaaaattttatttcataaagcaaagtttcctacattaactatccagctatctgttgtgtttttcatcatcatcacaaatggattcagactggctaccatataaaaacactcataaattctaggaatgccagaagttcctgtcctcaactatctaattgtattctttagataacttcacatattatgaagataaataactagcgatacagcagaacccatggtaaatagcactgagtcatgcagttaatgagcataatgtggacagaagagaaaatcactgttgcttctgtcccttggagcaggtggacttcagctgaaacttgagggaatactgtccattctgtttaggaagcattgctaggaagagtgtattgccagctgcttgtgtttttaaagtcactgcatgcatgtgtggtaatttgttatggcgacattaggaaactcatacaaattttgatgtctgagagttatatactgctgtaacaaatatctataaaatgtcaaagtggctttggaattcggcagtgagtgaggctaagagaatgttgaaggtcatccgagaaaaacttacattgttttgaacacattgttagtagaaatgtggttgttaatgattctgctagaaaggacttagaagaaagtgaagagaagagcatggtagagaaggcatagactgcgttagagcatacatgaatcagcatgaacagacttagtaaaaatagggacataaaaagtactattggtgaaggcttagaaggaaataaaaaacacattaaaaatttgaagaaagaatttccatattatatagcggtagaaacttagcaaagttgtcctacgttcaggtgaaaaatagaacttgtaaatgatgaaattgaatacgtaagtaaggatatttccaagcaaagggttgaagaagccgcctggcttcttgtttcttctcatagcaaaatgcaatgagaaagagataatttgagaaaagaaccgtttaaacaaaaagaaaccaagacataatgattttggaaattctcagtttattcagactgcaaaagatattaaaataaagaaactcagtaacagggatagataatctaaagaaaaagcctaggacacggctgtagtaaccttctgtttttatacctcagcaatttgctaatgcctcaaaaagatcaaaagtactcaaatataaagggctctttgaagagattagatttcctcaatcaaaccaaagagcatcgaggaagcttaaggttactgtccctcacatatctcagcagaaggcaaaaatagaagactgattatctaagaaagatctctgaaagagtctcatattatggagtgaacccctgtggcatacatgggagacccacttggttcttgagaattttatatcaggagaaacactgtcagtctgtattgaaaggaacagagaaaatacgaaattaaagaagactattaaacctccaaaattctggcaggaaagaagcttacacagctactcagttgcaaagatctgccacttttcatatacatgaaaggactcagaggaggaagccacaggtttagaaggaaaagctaaaagcaacatcgtattagtcttggatctaggaacctaatttctctagcagaatctagaaatggcttgggacaagtgattgtttttttacctaggattttctccctcttgaaaacaggactgtctgtaactattatcctatgcctgccctaccatcatatttcagaaacaggtaacttatgttttcactttcaaagattcacaataaagagaaattgtacctcagaatggattataccagagctttcctcatgcataaattaaataatttaggttatgtgatttgaagcttttgagtgggtgaggtgacattttggatgctgagttggtgccgtagtgagtccagaattctgcggaacttggtttcggttaatgaattttgtaggtgagatagtcttaaatctttagagtttagaaagtggaatgtcctacccagcataaaaatcccccagtgatgtacatgtcctagttcccagaacctatacataggttaacatatatggcaggcgtgattacgattaaataatttgatatgagtagattattgtcaaggtggtcccaatctcatcacagcagtcctaataagcagaaaacctttccaggcttccctgttgtcagtgaaccagggaagcctggtgtgtgggaagaactctattcgccattggttgctttaaagatggaaggggccacaaaccaggaaatgtggttggtttctagcagctggaaaaggcaggaaagagattttcccctagatcttctgaagagaaatgcaatcccactaataccttgattttagctcagtgaaacttttgtcagacttctgacctatagaacaacaaggtaataaattattgtagttttatacgactaatattttggtaacttcaatggcagcaatagaaaacaaatgcatgtaaaaattattgcccatgaaaactttgtttcagtaatgtatatatacatatatctcagtcatatagataaagaggtacatacatacatacacatacatatatgctacagaaagttcaccctcctcaaagtagtatgcaaatggactgtacaaactgaaaccatgaaaagtgattttaataatcaatgggaaaaattataattgtaccgtaatctttaatgatgtttgtcaagactttacaatctctcttattgttggttataaatttacaaagaattaaaaggtaataaaactagtcttacctagtactctttaatttaaaacacttgaaacattgaggttgaagtactttacttctttgtaaaaaacttagtataaattgttgatacactcaacacttggatggaaattgttgggtattactttaagggaattatactaaatgaaaaaaaatgcaatctcaacaggtaacaaattgtatattttcatttataaaatagtcacaagattacaaaattgtagaggaggagaatagattaatggtcataggacttagttgtttcgggggaaagaggtgggtatgattataaaggaagcatggttcctatgctgctggaactgttgtgattggagtcgtggctacggaaggctacatgtgtgctaaaattgcatagaactgcatatgtacatgtttatatatgtttttatgtttattgtcatacaagatgttaccatttgcagagtctaggtgaagggtacatgggggctccttgtatgttttttgaaactttctgtgaatctatacttattttaaaatataaataaaatctatcaacagtttttgtcctctacttcttatttataacaaatgatacagagtgagcatttttttctatgcattgacaacttctcatattcctatctaaccttggaccaactctcaagattttatcctttgtgctttcaatatctggaaaaaaatcctgagatttcctttcatgtgaaggtttttcctgacatcactttctctcagacatcttcataactgccttcacaatgactttcatttatttatttatttatttatttatttatttatttatttattatctttttttgagatggagtctcacactgtcacccaggctggagtgcagtggtgtgatcttggctcactgcaacctccacctcccgggttcaagcgattctcctgcctcagcctccagagtagctgggattacagtcgcccgccaccacgtctggctaatttttgtatttttagtagagatggggtttcaccatcttggccaggctggtcttgaactcctgacttcgtgatccacccctccctcggcctcccaaagtgctgggattacaggcatgaaccaccgtgcccggctcacaaccattttcttaatttacattaataagttcatcttcaatgagtgtctttgactacatactaaagtctctcaaacatcagctgtgtcaatattttcacccttagctatttcttctataactttgcttacatttaatttaaattttacttacagtgttaccactttttttttttcctgcacatttacctttgctgaccaactcattttttttgctcatacttttgttgtaagctgtcaccaacttccatcactgggaaataaggagggacacaactacatgccttggtatttaagggtaaactgagtaacagatcttcattgaccaatcactgacagacttcgaaagaaatgacacaatgactggtcactggtaatgatgtacagtgatttgtgcactgtagggctagcagtaaagtttgtcctttaagcaattttttccaggtaatatatcctggtaattaaaatttgaaccttgttgccaggggactgatgttatttaactaaataaggcctgataattgaaatctgtgtctatcagaactatagaaagcaaagagtttctggctatagagagagctatatgtatataagtcctgggttacaaagtcagatgcattttttactacaattttcaattttaaaaatttgataaacattggtaaagatggcatctgaataatgttattatctacatttccagttacacatctgtattagctattttcacactgctatgcagaactacatgagactgagtaatttataaacaaaagaggtttaactgactcacagttccacatgactcaggaggcctccaaaaacttacagtcatggctgaaggaaagaggaagcaaggcacatcacacttggtggcaggagagagagacagagagagagagctggggggtggggatctgccaaacacttttaaaccatcagatctcctgagaactcactatcatgagaacagcaagaggaattgcccccatgatctaatcataccccacaaagtacctcctttaacactgaggattacagtttcaagatgagacttggatgggaacacaaaggcaaagcatatcaacatctcaaatgcaccttatacaccaatcatactataaacattttctgctgccctgaacataccttgagtttcgtgaaattgctcaggctgcaatctccatcggaacttacattgcttatttactgggtgaagactttctcatctttcaacatgtccttcaggaatgtgctcccaatgacagcctttaggggcccttttccccatcgttgccatctatttaaaaaggaaccagcctcattctacccatctgcctttttctagtcagtagaaactatggggtgagtgttcttcagcttgttcccagcagtagcgttcagactctcattaggaatttttaaaaatactaaccctaatataagtcatggtcatacatgcatggaaaactcatgctagtctgtctacatatttttaaatgggcaaaatgagtgagaaaagaagaataagcatgtatctgtattgtgtgcacacacaagtgttttttaaagcaaagtcacaagattatgaaaaatattttgacatgattaagggactggcttaagaaaaagtaaacataagagaaaatttatttttggatgaaaaaatataaacagtaggattctccagggataaattctatggccaattttaataccatcttaattaaatgtcctttggtgtcattcagaaacagaacactgggttagacaagccatttcgttggcccagtatggcaatttattatgaaatctttctaaaggttgggctgtaaacagccatgatgtgaaatattaataatttttttagctataaccagagggattaaggtatttaccagaaaatctattattaaagatatgtctatatgcagaagtgaatttttaataattcaatcacactgatattgtactttttaaattacggttatgaattatagcagctgaaatagactgcaccaccttatcaattctacttttaatcattcttaattatgcatcaattatagcacttgtatttaaaagatattgcttaaatctgactgattatcacatatttgatcaccttgaatatatccatactacaataattaaattgatttctactctttaggaattttatcagttctcaggatttttaagagaatgaaagatcagcaaaaaattaagtaaaggaaaatgatttggctggaagcttgctatgaaatagacttactggggagaaaaaagatgatttttctctcagtatctcttcctttactaaatgctaaaataaatacctcaagtcattttctgccttcaatattgtaattgccaagatatatctgcacattttaattaatattgtggggtacaatttgcatacactttccaataatatctttttaaaagatttcccttaaaataagtactgtagaggaaaaaaattttcaaattaaatacatattcttttaaacaattttaaagtattaatcagttgaaattatttgtttaaaatgatttaattaacgtattaatttagtaacgtatttatttagtaatacagactcaatcgatatttactatagtaattttctatcagaatataaacaacagaaatatatttctcacattttgggaagttgaaaagtccaaatcaaggcgccaccaaatttggtgcttggggaaaacctgtttcctgtcttctcactatgtctccacatggtgtaatggacaagggaactctccatggtctcttttataagtagtcccattcctgagagctccacccttaccacctaatcacctccctaagtccccacatctaaataccatctcactgggactcaggttttattttaatgtatgaattttgaggacacacaaacatttgatttattgcattaaggttgcgttatttgacattgggtgtttcatgttttataaagtattcacagaatttctttaatgtattagatttgtctttaaattttctacaatttgtttagtttgtgaagatatgtagacaaattttatattttttccaggaataatctcataggtgaatacaaattgtaaatccaaagactaacaaaacctacataaaatgtatcaaatcatttgttaataatctatgttgatttttctataaaaaattaagaatgacattgacactcagatcaaggccatattctctaccagtaattcatataaacagaatcatagcaaaactatgttttgtaatttactacaatacataaatttctccccaattcaaattttttcaacatgcattggacttaattgaaggtcttcattacttttttctatgttttattcattcttcactcttccatattattaattgtgcaagacttcatagttgtgattaaaaatcaaagcatttaaaggttgacagagtaaatgaaagtctatataagcatcactaataagttttcttactcttactaggataattttcttttgttttataaggcaaatgaaaggatggacatttagaaaactattgtgagccaggcccctttctgtcattgtatataattcttttcatcacaatgtgaatagttattttaatctctattttactaaagggaattctgtcctgcaaaatgtttgctgtttggctctaaaatgatatagaccagaagacagtgtgtctggaatccgggtctcggatctctgtgaattctaggctcatgtgtttttcatatatcacctttagtgaactgatgatatgttttagaagcaggcttagtctcttatctttcattgtgttcttcccacagaggggggtaatggctcctttaaatttaatacaatgtaataggcttctagatttaaataataaaactgactccagaaaataaaagtttagatacattgaaactgctaaagcataacgcaaggcattttgaggacaacgggactcatcattaatcccagattatgacaataatgttaattacaggacaacaacagaatgtgcatagcacagactttaacagtggacttgaaatcaagaggactacagtatctcagagggaaaaaacggagcgtgggatcacccattccatcttgtcttagtctattggtagatagtgctagaacctggatgcctggatatttgcttttccaatctttgacacggtcgttttcctggggctgttttatgtaaagagggatgatatgaacatctggaaataagacgaacatcatcacatgctgggagggcacatcttctggcacgtaataattcataacacctccagaggaaattttgtttgaaagagttttatttggaaaggcagtttccaataataaattttttaagtccatgggcatacaactattaacatttgaagtaagccattccacatacattatgtttaaatcgtattttatatgtatccaaaaatggccaagtttcaattcaacatgtattgtttgagttccttattcaaaaacaaaatgaaacaaacagcaactacaacaagaaaaatacccagaggtttcttcagaataagatgtgatttatcttaatggaaaataagttctaaactctgtgcatgtgtgtgtatttttcaattctcccttaattaccttctttttcctttagaaaaaataaagatgagaatgctgtttcattttacttgatgaatgacttgtcatttctttcattcattcatgaaaatatttcctggggagctgttaagggcaaagtaaagttcaataccttgcctctgataaagaaggtctggactttacagttaaggaattaatagaaaagaatcatacatactaacaaatataatgcactattcaatatgttttgtatgatttcttgaaaaaaaaagtcttcaattttattgatgtaattgcatgcttcatttgaggtgctaattcttctctaatttagaaactgtagaacaaatgtttagatggatatggggaagaaatacatactgttattttcttcataaatacttgattttattagaatgaatgctgtaagattattttgttatataaatacttataaagaactattgcttttgaatagttttcaaagtctgaagaagaacatttaaaataaacagaggcaaaaattgtagaggatatatacacagaacactatcaaataaaagattttcttagaactagaaaccataaatgcatataaaaatgggtcaggtgcagtggctcatgcctgtaatcccagcactttgggaggctgaggcaggcagatcacttgaggtcaggagtttgagaccagcgtggccaacatgttgaaacaccgtctctactaaaaatacaaaagaaacaccgtcactactaaaaatacaaaaattagccaggtgtggtggtgggcacctgccgtcctagcttctctggagcctgagacaggagaatcgcttgaactcagaaggcagtggttgcagtgagccaagattgtgccactgcactccagcctggtagacagaatgagactccgtctcaaaaaaaaaaaaaaaaaaaaaaaaaaatatatatatatatatatatacacacacacacacaaataaaagaagtttatatacacacaaacacatataatgttatatatatattatacatatgtatgtatacatacatatacatatatgcataaatatatatggtcctctacttatgatggaattactttcaataaactgatatgttgaaaatacatttaatggcaataaaactcctcataaagtcaagatactgtaaattgaaccgtcctaagttgggaaccatctacattttataagttcaaaaatgaggaaagtctgtttgtgtatatatttagggagagagaaagagaatgaatgattaccacttccttagttgctttcatttgcacatttgccactctgtaaatttgtgtataatagagtatgatagttgagatttgtcctcatacagtcaatgctgacttccctttttaagttatagtgtgttgtaggttgaaatgtgtacccctagaaagatatgctggagtcctaactcccagtacctcagaacgtgatcttatgtagaggtaggatctctatagaggtaatcaagttaaaatgagattactagagtgggattttattgaatatgacttataaaaaggggaattttgtgtcttataaaaaggggaattttggacaaagagacaggcacccacaaaggtaagataatatgaagcaacacagggagaagatagtcatctataagccaaaaagagaggcctcgaacagctcactccttcacagacctcagaaggaaccaagcctgctgacagcttcattttggacttccagcctccagaactctaagaccatacatttcaaacatttttgttgaagccactcagtttatggtactctgtcatggtaaccgctgcaaactgacacactttccctagcacactcctcctctactctagagtatttggagtatttccagcacaatgttggcacatgtcccctgcctggccaaacagagcctgcaggctgataactcctccctaggatttcttttgtgactgctacctcttcccctggggtttttacgctgcaaaaagggcacccacaagaaagaaatcctgggaggacaactaggaaagagattagagataagaaaaggtgaacagaagacaggaagaacagaagaaacccaatattgtctgtcctgctgctgcttctatccaggttgaagagccacacttggattactcagcaataatatattgttggcccttagattaagcaagtttgagctgggattcagtcctttaattaaaaagtacgtgacgattctaactaatactgtatgtgattggttaagtgtcttccttctcctacacttaggtatacactcatatgcatacacacatgcacactggcaatgctattttgggaagaaagactcagtttgggttggtttgaatttctataactagtcttcatggtcacatttcagaagatattatgagagctgaaagctgctctcatttttttggttgggtttttaaaaatccgttgtttctcacctacttatctatgtaagatgaactcactttaaagttaatcagtactagtgctacatatgctgcactactcagtgagcagatgctgattaagtgaggcgctgctcccagccaaggtgtgtgctctggagagtggtaataattggaggccggtgtgtaaagctacgctagggggtgggagtgggggcgtaggggtgaggacttgctaagccatacctgcaccaatgtgattagtctagggctcagcctaaacactggtaaatgatatatatcattttggtggcccaataccctgaacatcatgctgtatatatagcatgatgttaaaataccttgctgagataccaggaagcaatatcccatcgcaaagaagttcccagattctatgtagcgcttacaaagtagttggccaaacctggtaacgatttttgtccttgcttttaaaagagagagttgaactttgagaaattttcttcagagaattctgtccaatgcaggagatgtggagggtggccatttttgcctcaagcctagtgagggaatcttcaatgggacaactcagagagcttgacatgtgtttcctataattgctagatgaggtcaattgatgttgggctctgcctatcatatctaacaggtgaggaaaaggcaagacagctgttgatgggtgaaccaaagaaagtgagattgatcaagggaggtccacactcccagcttcagtactgaaggcgagcacgcgcgcgcgcgcgtgtgtgtgtgtgtgtgtgtgtgtgtgtgcgtgctcaggagggatgcccaaagggcaaacagacttgagtagaaaaacagaaaaactacaattgctgtcagatgtgcagggcctgagaaagaagcaagggagaggccagaaaagggagcatctttgactctaagggtaaggaatgaagacaagaaaggattcacagtagaaacgtagtcagcttcacactgttttcaggcccagaggagtaggacacaagcccctcccctcgctccctggatgctggcctttatgggggacgaaacctcattgctatggaggaaagtagtagaattacaaagtagagaaagagtagtagcagctgcacacttgactcggattgccagcttccccctctgcggcaggtctgaacaaggagaacggataaaccctatcttcaaagtagctaatgttttaactattacacggaagtgggcatttttataactaaccaaagatcttttgattaccagagagttgtaatatcacaaaaggactgtaaacataaaatatatactgcataaatataaaggaatagtgggaaacaaagaagaaaaagaaaaaaaaacattaagcataattgttccgtctacttagaaggaattatctttctatttattaggttggtgcaaaggtaatttgtgcaaaagtaattgtggtcattgaaagtaatggcaaaaacagcaattacttttgcaccaatctaatacaccatggcttcaaatatgggctttatccaaaaataagcatgaataaaagcaatgtctaacaaatgtctgttgaatgattataggttcctaattaaatgagattattttaattctaagcttgataaaccatacatgtatatctgtggaaatatttaacagtcatgaactatataatgacattttggtcaacaatgtactgcatatacaatggtcctataagattataagagagctgaaaaatttccatcacttagtgacacagtagcgatggtaacgtcctacacagttcaatgcattgctcacatgtttgtggtgatactggtataaacaaacctactgggctgccagacatgtaaaagtggtacacactattatgtacaatatataatacttgataataaatgaccatgttactggtttatgtatttactatagtttttattgttattttagagtgtacttctactaattaaaaagaaaaacattaactgtaccacagcctcaggcaggaacttcaggaggtttccagaagaaggcattgttatcaaaggagatgacaactccatgcccgttattggctctgaagactttccagtgggacaagatatggaggtggaagacagtagtattgatgatcctgaccctgtgtagtctcaggctaatgtgtatttttgttttctagtttttagcaaaaacagttttaaaagtaaaattaaaaatggaaaaaagcttataaggacataaagaaagaaaatatttttctacagctatcaatgtgttcatgtattaagctgttattacaggagttaaaagtttaaaaagttaattataaacaaaaatgttatgtatctaatttattattaaataaaaatattaataaatttagtgtagcctaaatgtatagtgtttataaagtctacagtattgtacagtaatacctcacgccttcatattcactcactagtcactcactgacttacccagagtaacttcaagttcagtaaagtctgttcatggtaggtgccctattagaggtataacattttttatcttttatactttatacttaatgtacttttctatgtttacatatgtttaggtatacaaataccactgtgatataattgcctatagcatttagtacagtaacatgctgtacaggtttgtagtctgggagcaatagacttatatacaccatgtagcctcggtgtgtagtaggctgtaccaaataggtttgcataagtaacactatgttgtttgtacagtgatgaaattgcctaacgaggcatttctcagaatgtatcctcatcactaagtgacacatggcagtacttgttttttatttccttatttttcttaattttaggaagttgtattattgttagaaagcaaatttagtatattttgtgtgatataattgatatatattacttacaaaaattgttataaaagtaacactttaattttaaacacccttctaatgcatgctcaaaacaactttagaaaataataaagtatggcaaataaaatgatgggattttacacagttgcatgacttttagccagtgcttaaactttttgtgctcagtttcttcatcacaaaatccagataataatcataactatttcattaagttgccttgaggattaaataggttcacacatctagaacatttagaatagtgcctatcatacaaaaaagtgttagagaaatgctagctagtattagtatagcaattatttgccttattatgtgtctatatactatactaaaaaatacatgtcatactaataaagagtgcttaagtgttgatatatctatactaacaagattttcaagaagtgtaggtgatatgatttggctctgtgtccccacccaaatctcatctcaaattgtagtggagaggtgattggatgatgagggcagattcccccatgccattatcctgatagcaagaaagttatcaagagagctgatggttttaaagtgcggcacttcctcagtctctctgtctctcctgccacgtcgtgaagaaggtactcacttcccctttgccttccaccatgattgtaagtttcctgaggcctccccaggtatgcagaactgtgagtcaattaaacctctttcctttataaattacccagtctcaggtatactttatagcagtgtgaagatgggctaatacagtaggtgacaatgattgatgatttaaggactacaacaattgttattcttatacctatttcggcatagtaaatattttctgactcactcataaactaaaacaggaattacagaaatattgcttaactccatgagaacagtttaaattaaaacacaaacaggatgtgtagattaattaccactaacaaaaacattgtttgcctagtttgttaaaaatggaatgtaaaataagcaaagaggattaaaatacttaatattatacaaatagaattctttcaaaatatgacaaaaatgtcagaaaatatcttttaaattttattttttaagaaatcaccactaatttccttttcttcataaaatgttcccttttaaattgttcaagaagccgcaaagcaaattgaatacttaatatacaccctgatttatttatacttttttaaaagctctttatatttaaggataatcctccttttataacctgtggtctcttatttttaatacataattttgatcacttgtttttaaaaaatgccaaacttttaaaacatataatctcttaacctgattataataaaaaaatagctttgatagcttggtctggttattagaaatttaaactgtgcttttgtttttttcatgccatttccctttgacctaatttttgacgtgtatgcaaatactcaagacctataaaacacatacgtcttgagagtcagtagctgcctactccaagtgggaaaagactttaggaaactgtttcaataatcacattcatggagtatagtgacacagaaaccaagtctcactaccttttcatgtgttctagttctttccaaagggatattttgtaaaactacataaagggcaacttatatgactagtatttccatcatcgaagaggatatgataatctcgaatatgaggtcagaatcctcccccagtcttcttctgatcacagaagtggtaaaaggagataaacacacaggacacttcatcagtagccaggtgctattgtctcaatacttgtgcccctccaaaattcctatgttgaaatcctacttctccaaagtgttagtattaggaagtgaggcctttggggggtcatgatgttatgagggttccaccctcataacaaagagaccccagggagctccttggacacagctggaaggcttctatgagagaaatgagccctcaccagacactgaatttgccggtaccttgatcttggacttctcagccaccaaaactgacagaaataaatttctcttgtttataagccacccagtttatcgtattttgttatagcagctctaatggactaagacaccatggcttgcaatctgtttttgtaatcttaatagcacaagattccacaatgcctttcacatattctggaggctgaataccttactccctaagctgcttttccctggactttctccgattttgttgactttggcttttaatcttaccactctgatgatgtgagtagtacaggaaaacaaataaaccaccaaatatccaagaagaaatttcttcttaagcccaagcagtagcctcagtcactctatccacatctcccttctctgagagtcctgtctgtctatctcaacctggagcctttcgaggcggaagccctacttacctgaatgaatactcagggccaggcttccggtaccagcctcatcgatgaattgaagggaagagaagagggaagagaaccacaaaggaaatctcaaagaaaaagaaataggaactaagaaaaaagttccacccatgaagggtaaactctttctagctcttttcaattcaaatacatcaggttgttttgaaagaaaatacaattaaccagacagggaaaatgaaatctttcctttttgtcacagtttagaaaagtaactgctataacacactgcatcagaataatagatagtataaataattttatagactttgtaagtagagagtattagaacaatattaaataatcactgagattattacctgtccagtatcctttatttcttttggaaatactagtcctaattattgagaaattaatgaccctcaccccccaggacatctggttggctggcaccgcccctgctccctgtgtgtccacgatctcctgatgactgaggcaaatagaacagatgaacacatcacacagcatggccacgatcatgttaggctctttgctagaactgtacaaaaggaggtgtttgtttttccctgatgttattattttgggaacgtaggagccaggagcttctcatgctgttttgtgaaatactgtcttaagaaagagccaataaatgaggaaaaattagtcagaaagtgagactctggatgctgccataacaaaaatcagcccaggaccaggagttcttaattgtgtgatcccatatattctttttatttttaaaagtgtattgaacatttgtgtctaagactggtgaaggaagatttctatcccttaacgagggtcctgactgatatggtcaccactagttccagtggaattttgtttaatatcacaagaggcaaagtcaaattggttaacaattatttgaagccaatgatacagtacattttattttcttatattaagtttaataaatgctattagcaatatgaaatgtatttttaaataagttggaagattctgttctttcatatttgaaagtaagcagcataatttcataactttggttcataatagtttcctgttttccaacctgcccttggttttcaaaacaggctgttcatttccttcaggtaattacatttgaaacaatccaagaagttatcaggatgacagcattacttgcttgataattgttcctgtagaaatcacatcatgacttttttcagcatttttccttgaattttcacaaaaataaatatcttatgactttttatgttcagaaaatcactcaaattattttcaaatattttgaagttggaaaaatacaaaaagacgtttgccaaataaagtgtgcttaaatttttaaatgtgtgtgtttttgatggaaacttaattcatatgtttctcatccatttacaattagctgatgacaatgttttataagggtttgatatcagttattttcaaaagtatcattaaataatttatttttaactatagaaagttgaaaaaaatatttttatttgcttattctttttgtacatgtaagtaacatattgttagaagactaatcaatgtttacagttttcttatattctttataaaactgctaaatagttaaagtaataggaataacagtagaaaaagaagcaatcaaaggaagacagaacaatctaaaccagacggggaaaaaaatgagaaaaatgtacaataaaaggaaacagccaaatgatccagccccaaaggcaattctcctaaacaatgcatgttgtacaaccttgcatataaattggttttatattttcagatgtggaatatgaagaatttctattcatacaatagagagcaagtgcagttgactctcatactacagggatttgaactgtgcagattcacttatacgcagactttctttccttctgccaaccccaagacagtaaagccaaccccctttcttcctcctcctcctcagcctactctacctgaagacaatgagaattaagacttttattcacttaatgaatagtaaaaatattttctcttccttatgatttaattaactttttttgtctggcttatttgttgtaagaatgcagtatatcacatatatagcataaaaatcagtgttcatcgactgtttatgttatcaataaggcttccagtcaacagtaagctattagtaattcagtttttgaggagttaaaagttatatgtggtgttttttactatgttggcggttggcgcccataactaatgcgttgttcaaggatgaactgtgccagagttctgaataattgttcaaacaaaccacagcaggtctgcaatctgcatctttactcctctccttttgctccatcctttaacacatctgcgccccacagctggatccaactgagtcggacccccaagtagtacaaatataagatgaaatctcactttgtgttcaaaattgttgaacatatgtcctgtaagctctatgcaactattttctaacatttagatgtgaaaattcaagaaatacaattgtcaaatgatgcattctatgagagccagaatagtaattgaacctaatatctcatttgatgagacagtgtttgcaccatttgaaaaataatatattcttcataatttctctcaattctgaaaatacaagagcattaccactaatacttagcaattatcaacactgcacataccaggctttctgcttggtgttttgcatgtatgattgctaatcctccaaatagcaggaaaattatgtctttttaatccacattttacagagaagaaactcaacaggctcacccttcccaaaagttcccagtgatgactgttttagtaatatggtcttcagaaatatttcctactttctcaacatccacacagtattggctataaggaacatataaaattaatagggaagtgttcctattacaaatctaagtatatgtatgtataagtatatacatgtgtctctatgtaacaaacattatgcacaatacctaccaaagttctagtgatcttgtagctctgccacctaaaacacaggaggttcatgtccattgtcaaattggagggtcatgtgagatatgttcgaatctaggcctgaaattcacttatatcacttccctccacctcctattggccagacccaggtatatgctatgctgaatcaaagacattgtctcttcaacagtccactattctggttgccaaactattacattccttccatgttttgaacatactttccatctccacaaaggaatcggttctattctgtcctatctcatcattgcatatggctgaagaccagggtcatcaagaatgtatagtagtttctcatgcatctggatatggcccctgttggtccaatgacctatcaactaaaatggcaagttgtctgccaccacatacctgacatggggggagaatacccacaataaacatgcccaatccaaaggagaaagtcagaaggcatacagcagtcactggttggtgatattctgaaatctcactgagtagctattttgaaaacactttactttagggttctgagagattcttgattggacctttgtctctttttctggggaaaaatctcccttacacatgtccatgtaaaccctaggttctgataaggtactccttgtccgtgaatctgcctgtccacatctgaaatgggaattccttagaaggtgaccatctcatgataatggaaacccaagtcttgctttagatgtgaaacagccagatctccttgacaattgtttagaaacaactctcaaactatgtttttcatctcctctcacccacagcaaacatcaaaaaagaaggcttctgtgaccaaatgtgagcggagggagcttttccccccaccaagcaactcctcagtggataccaagtgggtatcctccaattaactccaacactatctacctgtcagatctcacatgttgagtactcagtcccctaaacttctcttgatttcagacaccagtcacaaatctaagcctccagaaattccaaccaactggcttcaagttgggccttccaaaatcccctctttgggctcaattaattcgctagagtggcttacagaacttaggaaaatacttctctttactagtttattatagaggaaattacaaaggatacagatgaagagatgcatagggtgaggtatgggggaaggggtatggagcttccatgccctccctgggcttgccaccctctaggaacctccacatgttcatctatctggaggctccctgaaccccatccttttggggttttatggaggcttcattacatagtcacaattgacaaccgtgtagaaatgtgactggacaaataacacataatctaaacccaatgaggcttgtctcttcagacttttcttggcctctttgtgtagcattctttcttctagggtaggagcagggaccttctttggaatgagaactttttttttttcttttttttgagacagagtctttctttgttgccaggctggagtgcagtggcacgatcttggctcactgcaacctctgcctcctggattcaagcgattctcctggattcaagcgattctcttgcctcagcctcccgagtagccgagactacaggcacacacacaccaccacacccaggtaattttcgtattttttagtagacatggggtttcaccatgttagccaggatggtctcgatctcttgacctcaagtgatccgcccgccttggcctcccaaaatgctgggattacaggtgtgagccaccatgccctgatggaatgagaatattttgaactacaatcagattagagtcttgcctgtggaagaaggacaggagaatttcagagagagaaagagagtttctgttccatgaggtctgctcctgaggcctaaagtgccccagcattataatagaagggtataaaaggggctatgggagttatcaaccaggaatcatcaacaaaatcacaatatacttccgtcaaaaatgtagtagccttcttatctatgtacttcctgtcagttccttgtgacagaaaccatacccattgctctttccttgatttaaatctcaagattaattagttccttgttcccatcatcatgtgtctttctcaaaagaatgttgtttaccttaagatgatctggttctctggttctttaagttgtaacaccacaacaataaagttctaggatagaactttttttgttttaaaaaacgtatttttaaatgccatgaaatttaatgtggccctcggaagtctgaagtgggagaataatgcattgacaaagtttactgaactggcaattccttttcctcccacctacagtctccaagctgccactcttcctgctctctctgtctctcttaagggctaaagatgcaatgtttctggcttcagggatcactggaactatttatttctttaaaaatggtttttatgtcatagcacatatgataaaccttaatatttcatgatacacttaatgatattgtactgcatacccaggctaatagaagaggctagtctcaatttgcagcaatagctctggctgtgtaaggcactcacaatcagatacagtagggaatttgcatcttgggcatatatgtcacctgtacccagcttgatttgggagattatgcaactcatatcaacttcaggatagcactcacttctacagaaggaggtaaaggaaatggatggtcaggatggaataggaggctcaattgtatttatagtggtttgaaacatgtttacaaattatttgatgctttctcatcaaatgacagagttaattttctccccttgaatctgattgtccttactgactccttaggaataaaacattgttgaaatgatagatgtgacacagaaagataagccatacaagatatttgtagttttcatcttgtctctcagagcactcacttggagagaaagccagctgacttgtgaggacacccaggcagccctattgagagatccatgtggggagaaactaaggcttcctagctaagtcatgtgagtgagcaaacttgaagctcgatttcccaaccccagtgaaagtttcagatgactgcacctctggccgcaaacttgtgagagacttcaagccagaagcatcccactaggcaactcctaaattcctgagcctcagaaactgtgagaaaataaatgttatggttttacatcacttattttgggagcgatatattatgaagcaattcattaactaaaacaatatttgtaatgttttatgctcagaaaatctaaagcaaatatgtgaaaataggataaattagggtaggtggcaggtacatgaatgccactgaacctgtttatttaacacttatattgaatttactatgtttccttcattgttctataatgcatttaattcttatgagtactctatgtgaaagatacccttcattttacagatgagtaaaatggagtctagagagatgctatacattgtcaaaggtcaccaatgaataagtagcacatacagaattcatacctggacagtattactctgtggtttctagttttagcattacactattttatggattataacaatgtcagttatttgcaaatctttgaaatatttcataaatcatgaaaacttaaatgatgagatccttttttccatcattttgatagccttttgtatatgcaaagatttataatttgtctttgttaactttttgggcaaaaggagaaaaatttaaagattagaatggaaaaaaaagaaaataaaaataattttatattcagcagcatattaagaaactatttgtttatttcctaaaacattaaggccagagtttttgccttccatggttcaggggtgatttaaaatttgatgactttcttcctgaaaatcatatttatgtgtcctgtcaggccttgagcccaagctaagccatcatatcccctgtgacctgcacatacacatccagatggccggttcctgccttaactgatgacattccaccacaaaagaagtgaaaatggcctgttcctgccttaactgatgacattatcttgtgaaattccttctcctggctcatcctggctcaaaagctcccctactgagcaccttgtgacctcccactcctgccagccagagaacaaccccctttgactaattttcctttacctacccaaatcctataaaacggcaccacccctatctcccttcactgactctcttttcagactcagcccgcctgcatccaggtgaaataaacagccttgttgctcacacaaatcctgtttggtggtctcttcacacggacgcgagtgaaatttggtgccgtgactgggatcaggggacctcccttgggagatcaatcccctgtcctactctttgctccatgagaaagatccacctacaacctcaggtcctcagactgaccagcccaaggaacatctcaccaatttcaaatccagtaagcggcctctttttactctcttctccaacctccctcactatccctcaacctctttctcctttcaagcttggcgccacacttcaatctctcccttctgttaatttcagttcctttcattttcgggtagagacaaaggagacacattttatctgtggacccaaaactccggcgccggtcacggactcgggaagacagccttaccttggtgtttaatcatcgccgagatgcctcttggattattcacccacgttccactggtgtctgatctccgcaggggtgccttccttgatcattcgcccatgttcccttggtggcaagtcaattgcaaggacgcctgctttggctgctcacccacgttgcagcccagggctgctccccacccccttctccgtgtctctacccttctctttaaacttgcctccttcactatgggcaaccttccaccctccattcctccttcttctctcttagcctgtgttcttaagaacttaaaacctcttcaactctcgcctgacctaaaatctaagcatcttattttattctgcaacaccgcttggccccaatacaaacttgacaaaggctctaaaatagccacagaacggcactttcgatttttccatcccacaagatctcgataattcttgtcgtaaaatgggcaaatggtctgaggtgcctgacgtccaggcattcttttacacattgttctctccgtactctctgttcccaatgtgactcatcccaaatcctccttctttccctcccgcctgtcctctcagtcccaaccccaagcgtcgctgagtctttctaatcttccttttctacagacccatctgacctctctcctcctccccaggctgctcctcgccaggccaagccaggtcaagccaggtcccaattcttcctcagcctctgctcccccaccctataatccttttatcacctcccctcctcacacccagtccggcttatagtttcgttccgcgacgcgactagccctcctccacctgaccagcaatttcctcttaaaaaggaggctggagctaaaggcatagtcaaggttaatgcttctttttctttatccgacctctcccaaatcagttagcatttaggctctttcatcaaatatgaaaaacccagcccagttcatggctcgttcggcagcaaccctgagacgctttacagcccaagaccctaaaatgtcaaaaggccgtcttattctcaatatacattttattacccaatccgctcctgacattaaataaaactccaaaaattaaattccggccctcaaacctcacaacaggacttaattaacctcaccttcaagttatacaataatagagtagaggcagccaagtagcaatgtatttctgagttgcaatttcttgcctccactgtgagacaaaccccagccacatctccagcacacaagaactccaaacgcccaaaccgcagctgccaggggttcctccagaacctcctcccccaggagcttgctacaagtgccagaaatctggccactaggccaaggaatgcccacagcccaggattcctcctaagctgtgtcccatctgtgtaggaccccactgaaaatcggactgttcaactcacctggcagccacttccacagcccctggaactctggcccaaggctctctgattgactccttcccagatcttcttggcttagcggctgaagactgatgttgccggatcgcctcggaagcctacaagaccatcacagacgctctaggtaactctcacagtggaaggtaagtccgtccccttcttaatcaatacggaggctacccactccacattaccttcttttcaagggcctgtttcccttgcctccataactgttgcaggtattgacagccaggtttctaaacctcttaaaactccccaactctggtgccaacttagacaatactcttttaagcactccttttagttatctccacctgcccagttcccttattaggtggagacacttatctgcttccctgactattcctagactatagccacatctcactgccgcccttcttcccaatccaaagcctcctttgcatcctcctcttgcatcccaccttaacccacaagtataagatacctctactccctccttggtgactgatcatgcaccccttaccatctcattaaaacctaatcaccctttacccctccactcaataccaatatcccatcccacagcacgctttaaaaggattaaagcctgttatcactcacctgctacagcatggccttttaaagcctataaactctccttacaattcccccattttacctgtccaaaaactggacaagtcttacaggttagttcaggatctgtgccttatcaaccaaattgttttgcctatccaccacatggtgccaaacccatgtactctcctatcctcaatacctccctccacaacccattattctgttctggatctcaaacatgctttctttactattcctttgcacccttcatcccagcctctctttgctttcacttggactgaccctgacacccatcaggctcagcaaattacctgggctgtactgcctcaaggcttcacagacagccgccattacttcagtcaagcccaaatttcttcctcatctgttacctatcttggcgtaattctcataaaaacacacgtgctctcactgctgatcatgtctgactaatctcccaaacctcaatcccttccacaaaacaactcctttccttcctaggcatggttagtgcggtcagaattcttacacaagagccgggaccgcgccctgtagcctttctgtccaaacaacttgaccttactgttttagcctagccctcaggtctgcgtgcagtggctgccgctgctttaataattttagaggccctaaaaatcacaaactatgctcaactcactctctacagttctcataacttccaaaatctatttacttcctcacacctgatgcatatactttctgctccccagctccttcagctgtactcactgtttgttgagtctcccacaattaccattgttcctggcccggacttcaattcggcctcccacagtattccggataccacacctgacccccatgactgtatctctctgatccacctgacattcaccccatttccccatatttccttctttcctgttcctcaccctgatcacacttggtttattgatggcagttccaccaggcctaatcgccacacaccagcaaaggcaggctatgctatagtgcaagccactagcccgcctcttagaacctctcatttcctttccattgtggaaatctatcctcaaggaaatcacttctcagtgttccagctgctattctactacccctcagggattattcaggccccctcccttccctacacaacaagctcgaggatttgccccacccaggactggcaaattagctttactcaacatgccccgagtcaggaaactaaaatacctcttagtctaggtagacactttcactggataggtagaggcctttcccacaggatctgagaaggtcaccgcagtcatttcttcccttctgtcagacataattcctcggtttggccttcccacctctatatagtccgatatcagaccggcctttattagtcaaatcagccaagcagtttttcaggctcttggtattcagtaaaacctttatatcccttacactcctcagtcttaaggaaaagcagaacggactaaaggtcttttaaaaacgcacctcaccaagctcagccaccaacttaaaaaggactggacaatacttttaccactctcccttctcagaattcaggcctgtcctcggaatgctacaaggtacagcccatttcagctcatgtatagacgctttttattaggccccagtctcatcccagacaccagatcaacctagactgcgccccaaaaaacttgtcatccctactatcttctgtctagtcatactcctattcaccattctcaactactcataaatgccctgctcttgtttacactgccggtttacaccgtttctctaagccatcacagctgatctcctcgtgctatccccaaaccgccactcttaactcttaaagtaaataaataatctttgctggcaaggctatgctgaacctccttaggcactctctaattagatgtcctaggtcctcccaattcttagtcctttaatacctgcttttctccttctcttattccatttagtttttcaattcatacaaaaccatatccaggccatcaccaataattctacatgacaaatgtttcttctaacaaccccacaatatcaccccttaccacaaaatcttccttcagcttaatctctcccactctaggttcccacgccgcccctaatcctgctcgaagcagccctgagaaacatcgcccattatctctccataccacccccaaaaattttttgccgtcccaacactttaccactatttcgttttatttttcttattaatataagaagacaggaatgtcaggcctctgagcccaagctaagccatcatatcccctgtgacctgcacatacacatccagatggccagtttctgccttaactgatgacattccaccgcaaaagaagtgaaaatggcctgttcctgccttaactgatgacattatcttgtgaaattccttctcccggctcatcctggctcaaaagctcccctactgagcaccttgtgacccccactcctgccagccagagaacaaccccccactttgactgtaattttcctttacctacccaaatcctataaaacggctatctcaacctatcccacccctatctccctttgctgactctcttttcagactcagcccgcctgcacccaggtgaaataaacagccttgttgctcacacaaaacctgtttggtggtctcttcacacagatgcgagtgaaatgtaccattattggttgtcagatatttccttttctttttaggaagtaaagtgcctccaggaaaatccacatcctaactggtaagagcctacttacaacaagtgcaccttgacgggaaggcattgatattcgaaaggaagagaaattctagatacaatacagagtctattgcttgaatctatctctaaactcagacttgggttaatccaatgaaaagtaggaaattttactgaaacccaacagatttgcattgctataaaactctgtaaaatgaccaagtgccaggaggctttatcataccttggttgtggcagaagactctggaatcccaggaacagagtataattttgagggtatcagagcaagaaaggaaagcagaaagctttgctgtaatctacacacacaaacacaaagtggtttactaaagccatctgcaatttcaaggcaatcagtacactcagtaattcaaaactgtttattgagatctaagatatggaagccagtgtgctgactccaaaggtataaaggaccagcaagaaagtagacactttaactgcaaatataatggagtagacagacaggtaattaaaatctagtgtgataaaggatcttcttgagagaaattattatgtcttgagggcaagaaagggaactaattaagtttgcattttaaaaattgttaagaatagatgtaggatgggatagagggtaccttagagatgcaaggattgtggaggaatactttcatatgttttatgatgaattgaaagaagataatattctacttcctgtgcaagtcatatatatgtttgacacattctaaagcagacctaacttagggatcatttagatttgagtggtaagagatagaaagtaatgaggataattctcatgtttctcacttacctaagttttattctatttaaacaaagtagaaattagtcatagcaggaacactctgagtgttcataattttttaaatgagtgaactcagcagctttgataatataattagacatatgtaacaatacccatctacctgggttggctttataaaatgtagatatcaatacttggaaaacaagttatcctttcatgtttattcattaacaatagtatgtccttcatcttaagtagtcatacatcttgctctttcttgattggaaccttaaagctaaaaatgacatatggacctctttgtatccatataattaacaacaaacagatataattgtttgaataattttaactacagaactgtgttaatttcaattcaactgaatgcagagtagtagactaacaagaagctctttaagctacaaagaattaagcaaaacaattataaaatcaatttgacatcgcaacaatgatacatatttctgcatttcagacatagctagaatggagaaccacttataggataataatttacattaaaataaaaggtataatcaaataaaagaataataaaataaaaatgcagcgtgaaaatataagtaggtactgctgtttaattatatgttttatgaaaatgcttaatgttttagaaaaatgagaaacagaaaaattgctcttttcattcaatttgttgtagatttctttctgcattctttatgagctcttgtaagagatatatttctgttattgtaaacgtactttgttactttctatctaatgttataaatttgctttatatggtttcaatgttctgaaattaaccctctctatgagatttatgattatttagcaaaatttttatcaaaaacatccactcatttatattttcttggaggggtttagtttcaagggcccctttaaacattgataaaggtcattaacttacaggtaatatcttactttttaattggtgtgtgtgtgggtgtgtatgtgtgtgtgtgtgtgtgtttcaggggaagaattgtaaagtgaacatattacttcctctcctgtggctggactttgattactattgggtcactgaaggaagtacaaaagcgtgttcttgggcgaaaagtaaattaaacccacaaagatgtagtctacaagaattaatggtgaaaaaaaatcaaggaagatttttgataagcctatataagtattaatcatcaaaatgatataaataagctgggtgggtctaaaaaatctatactcattttgtcacatcattcaagagtaaaatagatatgtttaaatttaccttatagtttattaataatgtatgtattttaaaattcatctttaaaagtatggatatagaaagtgtaacacaaataagtaaagttacgtagtagaatcaaccaaattattttactagatgaacagaaaatagtttgtattaatgaaaagcaatggaaatcaaggtaagtaaacaaagtatgacaaagagattcaaaatacctctataaacatgataaaaataaatgaattaggctgggcatgatggcttatgtctgtaatcccatccctttgggaggctgaggcgggtggatcacccgaggtcaggagttcgagaccagcctggccaacatggtgaaagcccgtctctactaaaaatacaaaaaaaatttagctgggcatggtggcaggttcctgtaatcccagcaactcaggaggctgagtcaggagaatcgcttgaacctgggaggtggaggttgcagtgagccgagattgcaccattgtactccagcctgggtgacaagagtgaaactctgtctcacaaaattaattaattaattaattaattaaatgcacgagtgggtgaaaaaaaggagagttgtaagatctaaagtataacatgctctatataaatattttgaacggaataaaaatactatgtttttgttggatacatgcatttggaatacctgtacaaaaacacggtaggaaaaatacacagcaaatactaaacaacacttactctttagaaaagaaagataaagaaaaattacttatagcggtttatgttatttagtagtaagttaacttttactaattctgggtgattcagacatgcgtgcttattatgttttatatgtgcgtttctttgtgtttcaaatgtttcacaattacaaaggttgatactgtgtaccttaaaatgtagactaatcttacgtagatctaaaagacctaggtatcatccaggatcagaataccttttgtttcgttgttctgtcatccctttagtgtatggtacttgtttacttcttcaaagatggcctctaaccagcaagaaggagggaaaaaaaagatgtaataagaagctatcttttaaagacatgacacttcagttgcagagatcattttttgtttataaatcagcagccagaacttagtcatttgatcaaacttacatgcaaggaaggctgatagagtcttaagctgagtgaaccagtgttccgattaatactttgtggttctatcactaatacaccgaacagaaggatgaaaactgcataagcacatttgcattataagcacatttttcaacaaaatcattaatacagcgtttctaaaagcataggcttggaccacagactgttcagaaaagttccctttttctaggggtaaaggaggtataattttatgcttctgggtcagaatgttttagcaaacagcagtttaacatagtaggactttatgcttatgcaaactttatctcaccaccctcctcccagaaaaaaaaaaaaaaatcagcatgctgagtgctgagttttagttttaataagcaaaaatcagcagcccagcagcctttaacgggcttgagggacaagtgtgattatttttacaaggatatttcatgaattaaatgaaaagaatcatattattcctgagcaccaatctccatgagaaagagcaaaactagaacaggtgagttattccctctccagagcaaattttattttaaataaaagcagtgccccataatttaagtaggcaattcaattcaactttgattccttagaagaaactgaagattaactaatgtactattgtattagtatcggtaaacttcttaaggaaaaacgctattgaatgtgtcaatattagattaccttcattacattgttaaactcataaccctgctacaaaagaatctcagctggacaggatgttacaatttgttgcattgttgtcatcaaataaaaaccttccttgagcttccatgtgttggtgatgatagcagctactctgatttcagccatctaaatatggtctgaaattttcagacctcttgactgtccaatgtatgtgtcacttatgaagaataaggtgaaattttaaatttatttaaagtctaggtgtccataatttggttgtaaaatatgattattttctaaaagttgcaagtgcaatactacaactttttaatatatttttaaagtttaattactaatagctattttctgccttcaagaaaaatatcaaaagcagaaagtgtaccaaaggcacaagaaagtactgatgtgttttaagacagccaagttctgcaatttcatgttaaagttttgtgagttgaagttggcttaacacagatattttccagagagggagaattggcagatatgaacagactggcatggtactaatgaaaaaatgaactggttcaagtggttggaaagtaaacaatatgtgtttgtatgttattatccattaatgatccgagaggtataattggaagctacgaatgactttcataacttaaagagtaaatgagtttcctaaatcacgtgttacattgtactattcagttgagagagccttctcctatttgaaaatgtgaacattatatgaatgtataattttaaaagtggaaaagtagtgcatgttaaatattaaatattaaaatttgcataattataatacagtatttctttccaagtatcttgtgaaataaaaatttaaaaattttactcaatgtgttattttaggtacaagtcaaagcttccaggtagttcatcaatagtgtggcgtactttacagtaatttgaatgcaattacgcaaaactgctatcacagctttggaagacattatgtgagagagcagaaaaaaaataaaataattttctaaaagacatagtgaatgctagaaaactaatgaagacttcaggtgcattttaagctgtcctcaaaatgctaagacatgtttctatttgcaaacagcagcaaaacatatataaccaattttctcttatttcaaacaattttagtgtcacacacacaccttccatagaaaatcaattgatattttaacttacatttattcttagaattagctatgcttgattatagaaacattattttggttttggaaagcatcaataataaagccctcccttttctccatgaaattgatactggctctctgaagcatgaagattattcttaaataatattcctgtgagtttaaataaatttcatgataatgtggcttaataaaccatgatttccccttctagaaaacacaattcctcctggagggtgaataatttagcattgcttaacacacattctcactttaaaaaggaaaaactgagtacacattcactgtgcatcttatttcagtctttcaacaatgagagagaaaacatgatgatggatttaactggccagcactacaaatccacaggattcaaaatgtaccataactaagaaagtcacaagccaggaggcttagcaaatccagtgggttccatgactcttcaaatattttcagagagcttatcgcttaagctcataaccctgatatgtaaaatagaagaaaaattcttggcccttctttccagagcccattcaaaagtgtggagaagagtagtctagaagttacgtcagttgaaacatttcaaatttctttgtctcaatgtgaagcagagctaggaggattcgctaaccttcatttcagaattaatattcccagaatgcacgtgttctagatatgttgattacctgtgctaagaagaaatgtaaagaaaggcaaagcatgtttaaaagttataaacacattctggttccaggaaatgaagaaaatttaaaaggcacatattaagaagtaagattaagggctgaaagcagccaattatcccactgtaatattaatacatgaaaattttccactatatatatatatatatatatataactactttaacattttttttccttttaactctaaacattttgtcagtttgtgtgggaaaaaaatagacctgccacagcttactgtggaacagctattatttccatgagttttgatttaccaaatacgtaaatttaaacctagttttaaaactaatttaatggtgatggtccatttgtatttctctagcttgtttactaaagacattgtgttaatgtttaaatctcatttctcattttaaaatgaaactcaaaagatttacatctatggtggtatttttaaaaatatgcacacacaaaacctttatgaagccaaaaataattgaacaattatatttctgagaagctgcagaacagtagctttaataacgggctttaagctttaatttgccaagttgttttagtacccaaagaaagatatgtactcctgaaacttgcatttaagattctaagattgacttctttcctttaaaatgcagggctatcagtgttgctgtattaatggtataataagaagggaaaagtgtcagtgaatacagcaacagccaaaccagctcaactaggattgcagaaaatggtatctgcctttagcttgatcgtggtaaacattttattcaagatcaaacttttcaaaattccaattggtcaaataaaagaagaaattgatcctcactgacttttggaggatataaataaaaagaaaaaagataccactagactcaaataattcacatttcactcatccactgtcaaacttcaattaatgaatattgttgaaatttaatgtgtgaacaaatgtttatataacttcttatgaaagttaaaatttttacatagaatattgtatccttttcaaatttgtctctagagtaaaatacaatagaaaatttcttgtatatttatgtacatttttgttttcaaggctgtagtgcaatgtacacttctaaaagaatttggtgtctgcataaactgtgtctacatggagaaatctccagtttcagagaatatttgatgaaaaaatgtaaaggtaaactggataaacacaattacatgaataattctaatggataaaataataatgactaggtaagaagtgtaattcacctgagggttggtagtaccttgtgcgatcatcatgttttgggatgcattactaaaggaatctttcaagattttattatttttcttttcctttttttcttttctcttccttccgttctttccttccttccttccttccctccttctctccctccctccctcccctccttccttccttcctccctccctctctttctctctttttttctttcttcctttctttcttcctttctttctttctcttcctctctttccttttcttctttctttcctttttttttctttcttttgacagggtctctatattccaggctaaagtgctgtggtgcaatcatagctccctgcaacctctaactcttgggctcaagggattctcccaccccaacctctcaagtaacctctcttaaattgccctttcttagtcttctctgtgaatgattctccctctgagtgtcgtttggatgttggacttcttttctcctctactgagtcctatttcaggtcttctgcctagtatttaaatccaactagcctgcaccctactagataatgttacttgctgaaaataaattaataaataaaacagtaaaaatgaacaggttatagaaaaaaatgatgagagtgactgagacaacttacaataaagtgataaagaaatgcctctttgggagggaccacttaaacatgggccaatattatgttactcatgtggctcacatccataggaaaattagaagcaacataaagaatgctggcaaaatccccagggtaagagtgtatatgatgcatctgagccaaaaagtatcaaaaaaaaaaataaaataaaatagagcaaaaagagagcaaaagaagagtgccatgagaagttgagaaggcatacaggagccaagatcatgaaaatcttgaaatgaaggatgtttggttatactccagtagcaccagaaagacattaacggggttaaaaaataaagtgtagcaaatgtattcatttattaactcatttgttttttccaaagaaatttgcctcattcctatgtgcccagcactgggtaagtgctggggctatgatgtaaaaaaacaaaaaacaccattttgttctcatgaaacttacagtttagcgaggactggaatattaaacgaatatacatatgtaaatccaaactgatatttgctctgaatgaaagaaatatggtttcaaaaggattataatatagaatctgacacagattaagaagtcaggaaatgcatcttagaggaaagaatcatgaagctgagatctggaggatgtgaggagatacatgcgctgtcatcactgttgtacagggagcatagcacatgtgagatgctaaaagaagggcaatatggcccaactgcagaatatagaggttattgtaatgtgggacaaggctgcaaaaatacaagaaaaatcataatatgccatataagccaggtaagaatttggtttttagcctcagagcaatgggaagccattgaaaggttttaagctgttagtgagataattggatgtgaaaatgcgatggcatgtttccaagagattgaaaggaaaccagattggataaagagagactatgatagagagattattaccagtttcaaggcaggaaataatagtaaccttgttcaagatggtagcagtggatatgaacgaaatggacaaattctacctatgttttggacagtatttaccacctttatttctaatcactctctgttagtccattcttgcattgcaacaaagaaataactgaaacagagtaatctgtaaagaagagaggtttggctgggtgcggtgactcacacctgtaatcccagcactttgggaggccgaggcgggcagatcacctgaggtcaggagttagagaccagcctggccaatatggtgaaaccctgtctctactaaaaatacaaaaattagctgggtgtggtggcaggtgcctgttgtcccagttactcaggaagctgaggaaggagaatcgcttgaacctgagaggcagaggttgcagtgagccgagatcatgccactgcactccagcctgggtgacagaccaagactccgtcaaaaaaaaaaagaaaagaaaagaaaaagaaaaaaaagaggaaagagaggaaagaaagaagaaaaaaaaagaaagaaaaagaaagaaagaaaaaagaaaagaaaggagggagggagggaggaaggaaagagagaaagaaagagaaagaaagaaagaatgaaaagaagaagaaggaaggaaggagggagggaaggaaggaagaaagatttaattggctcacagttctgcaggctgcacagcaagcaagacactggcatctgcatggcttctggggaggcctcagggagctttaattcatggaaaaggctaattcaaggaggaggctagtcacatggcaagagtgagagcaagagagagagtggggagttgttacacacttttaaacaaccagatcctatgagaactcactcactgttgcaaggacagcaccaagccatgggggatctgctcccattacccaaacacctcccacaggccccacctgcagcactggggaccacatttcaacatgagatttgggcaggacaaacatccaaactattggaacactcaacttcttagacatttttaatagcccctcctctatgaaaattttaatacaaaggtataaagtgtatctgattaagtagtgtgtgtatgactgttctttgtacattaaaacatttttttaatccccctccaaaaaagtaccaattgtaatcctctgagggcagtatataattcatggaggctacatgctttaggagtgataattcaacaagtcatggcagtggtttgaacataggaagaaaaaggaagagactgtcaaactttctagcttgcataatttaatggttttacttttttgagaaaaagaataccagaaatgaactaggtttaaatgagggcaggtaagatagtttttgtttcagcatatcaagtctgaattgtttttgagaactctaaataaaactgttggtaggagatgttttccctttcgtttctggcacaagcagggagtgcagctgcagagaagatgcctttgtaaatcattgcatttctgaaggcaacatcttcccacttacaaagtctggaactggaagacctaagcagccctgctgataccagtggaattggaaatggaatggagtgagaatgaaagagaatattttgactggcagactccagtcacagagtctgaatcagggaaagaaaccccttgtgtaactggtgtgagatggtatctcattgtggttttgatttgcatttctctgatggccagtgatgatgagcattttttcatgtgtctgttggctgcataaatgtcttcttttgagaagtgtctgttcatatccttcgcccactttctgatggggttatttttttcttgtaaattcataggtaggaattgaacaatgagaacacttggacacaggaaggggaacatcacacacaggggcctgttgtggggtgggggaaggggggacggatagcattaggggatatacctaatgtaaatgacgagttaatgggtgcagcacaccaacatggcacatgtatacatatgtaacaaacctgcacgttgtgcacatgtaccctagaacttaaagtataattaaaaaaaaaaaaaaaaaagaaaagaaactccttgtgtatccagggagacttgggagtaaggccaggttttgtgtgtgcatgtgttttgttttttgttttttgggttttttttttttttaactctcttgaataaatctgggagttgatggaaagaatagattaaatgctaaaatcttcctaatgtcttattctggtagtaaagaagtaaagaggttataaaaaattaatatcaatggtgtggaaacagttgaaaaataaaacatcttggagggggtttgtttttttcttcaattttcatcgacaatagagaacaagcttaatttgactttttggaatagaagttatggctcaaacatttaaaagcatagttagaatctaaaaaatgaaacagaaaatgaactaatcaagcaagcaaagactatataagacaaaaagaaaattgacaacatagtaaaataaattataaacacaaaaaagataaaaggactaaaacaatttcacttacaatacaaaatgagaacaggctaaattctctaaaacttaaaacagtgactttcaaattgtaatttaaaaaatactgccatattctctatggttccgtatgtaactatgtttgcttaccacccattaggctattttacaattctcatgcaatggtaatacaactaaatattttaaggagacatgcaattgctttatgatcaatagaaacaataatcccagaggttgtcttcttgatactttatagctattagttattgtaaacaaggcccaaaatgttcatttatacctaccactttgaggaaaaggggacttaactttttcaggattacctttctgataggattttgttatggaagataacaaaaaccactgaattaacttgtttctcttttcagctatggaaatgggcttgatcattattattttttaattcttactatctttatcagttttaatctgtatgtgtgatgtgacatactgttatatttatataacagtgatgtgatatactgttatagagatacaacagcatattaatatgtgtgatgtgatatattgttttattgatatacttttctttttttcaaatgagacatttgtttaatgttctatagggcaaaaaaacctatagtgtttgggaatattcacatttctgtactcaagatgtggaaaatagttaatatattttgtatgcatcattgactgtttaagagtttgaaatgaatgtgtattaactttgtaattatattattttaaaagaatagtaaacaagtattttaaatgctttacaaaaaagaacatgaagttactagttgcacttgtaagttcttaataagtgactgttccttaataagtgactgttaacagtatatcacatcacacatcaaataacttatcaagtcacttatctgtgatattgttataatggtataacagcatatatcacatcacacatacacaacagtatatcacatcacacatacagactaatcttaaattacaggattctgattgcatcacttatcaagaatcattactttggaaaaattgctaacaacataattgcccataaaatacataccctatcaaggacttgaagaaagccttagtcaaatatcaccaacacccaacaactacattctgggatttggcttaaacatgactgtcttactttcttttaaaaatctaatacattgttattactgtagtcaccatgttgtacaatgtatctcttgaacttatttcttccagttgaaattttgtattcttttaccaacatctccccaaatgccctcacccctcccaacttctggtaactaacattctactctttcatgagttcaccttttttggattccacacataagtgagatcatgcagtatttgtctttctgtgcctagtatatctcacttaccataacatatccatgttcacccatgttatcacaagcaatagggctttattcttctttaaggttagatagtagtttattgtgtatatgtaccatatgttatttatttactcatttgttgatggacacttagcttgattccatattatggctattgtgaataaagctgcagaagttttattctgcacatagcagtgcagatacctcttcaagatttggattgcatttactctctctctctctctctatatatatacatatatatcgatgatagatagatagatagatagatagatagatagatagatagatagagatagagatagagatatatagtaatgggattgctgggttgaccattatttttaattttataaatgttacctatattggataccttttctggtccaactatattctatacaaacagacaaacaaaataatcaaaaaccaaaaatgctattggagtagtctgtataattgaaaaatatatatatacttatatttattttggagggagttgtattcgttgtacaactgctaaataaggaaagattttgagttggtctcacttcagtaaaagactcacttacctggatgtttatctgatatgtggccaagtgtctgaagagttagacaagataaaaatcacaagaacacacgtttgtggttgaatatggatagttgccatctgactgtaataatgaatagaaatcagagttttgctaccaggtactctgctcgtagtaatcacagtagtttgtatgtgtacaatgatgaatagtgttgtagttgttggcattattcttattcggatgttgctgtgtattgactgtcacattgtatcagaggactagcttctatgtatagtgtgtagtataatgtttgagactaaaatgattctaaagagcaccaatgtgtttctaccattcaagaaaccttttttttttctttgcgtctgtgagacatatgagaaaatcaataaatttactttcttggaaaaataaacacttcctatgtaaacaaacatagacctttagagcagtataaattgtttgtgaaaatagtttaattgcagcaaacacacagaaaggattaacttattttcagatttggtagttgctactgtgcatgtctttttttcttttaatctacaccaagaaacccagattcaaatgcttagtattatacaatatttggtagtttttatttttgatcaaatctttaaaagcaagaaatttttagaaggcacaaaaagcacaaactgtaaaagaagaaaacaaaaacaaaaaaatgacgttagtcttaatcaaacttaaagatttcttctctttgtaacatgctgttaaaaatgaaagcctcagactaggacaaactatattcaatacatctcaaatatatttgacaatgcacttgtatctataatgtataaagagcccttaaaattcaataagaagacaaaacaagtttctttttaaatggacaaagattgtaaaagacagttcacaaagataacaaataagaaacaaacaagcctatgaaaataagttcaacaacattatccatctgataaatgaaaataaaaatctaaatgagataataccacagacctattaagatagttaaagttaaaaagattgacaataccacatgtgagtaagcatataaacaactagatttctcatacattgctagtgagaatgtgaaatagtataatcactgacattgtttagttctgtgtcctcacccaaatctcgaactgtaatccccatgtatcaaaggaggacctggtaggaggtgtttggatcatggggacagtctcccccatgctgttcttatgatagtgattgagttctcatgagatctgatggttttataaggggctcttcccccttcactcactctctctcctgccaccatataagacgtgcctgctaccccttcctccatgattttaagtttcctgaggcctccccagccatgcaaaactgtgagtcaattaaccctcttttctttataaattacgcagtcccaggcagttctttatagtagtgtaaaaacagactaatatagagaaatttgtaccaggagtggggcactgctataaagatacctgaaaatgtggaagcgactttggaactgggtaataggcagaggttgggaacagtttgagagaactcattgggaaatggagcaaaggttgctcttgctacactttagcaaaaacacttgcagcattttgctccggccctagacatctgtggaactttgaaattgagagagatgatctgaaattggaacttatacttaaaagggaaacagagcataaaagtttggaaaatttgcagcccgaccctatgttacaaaaataaaaagccattttctgtgcagaaattcacctggctgcagaaatttgcataagtaatgaggagctgaatgttaatagccaagacaatggggaaaatgtctcctaagggcctgtaagagaccttcacagtagcccctaatatcacaggcctggaagccaaggagggaaaattggttttgtgggcaaggcccagggcctacttctttgtgcagtatcccaacttggtgccctgtgtcccacccactctagctctagccatggctaaaaggggacaaggtaacacttgagccattgcttcagaaggtgctatcgataagccttggtctccatgtgatgttgggcctaggcgtgcacagaattcaagaattgaagttgagaaacctccacatagatttcagagaatgtatggaaatgcctagatgtccaggcagaagtctgctgcaggggaagagccctcatggagagtctctgctagggcagtgcaaaagggaaatgtggaattggaacccccacacagaggccccactggggcatgcctaatggatctgtgagaagagggccatcatcctccagatccgagaatggcagatccactaacaacttggactatgtgtgtggaaaagctgcagacacttaatgttagcccagaaagcagctgcaggagctgtaccctgcaaagccacaggggcagagctgcccaaggatgtgggtgcccactccttgcatcagcatcctctggatgtgaaacatggagtcaaagtagattatttcaaagctttaagatttagtgattgccccataggatttctgacttgcatgggacctgtaacccctttgttttggtcaatttctcccatttggaatgggagaatttatccaatgcctgtactcttttggaagcaactaaattgttttgtatttgtatcttggaagtaactaacttgtttcttattttacaggattataggcagaaggaacttgccttgtctcaaaaaaggctttggacttggacttttgagttaatgctgaaatgagttaagactttgggggactgttgagaaagcatgattgtgtttgaaatgtgaggacatgagatttgggaggggccaggggcagaattatatgattgggctctgtgtctccacccaaatctcatctctaacatgttggaggagggacctgaggggaggtaattggatcatgggggccattgcccccatgctgttctcataatagtgagtaaattcacatgaaatctgatggttttataaggaacatttccccctttgcttgctctctctttttcctgccatcatgtatgacatgcctgcttcctctttggccatcattgcaagtttcatgaggcctccccagccatgcagaactgtgattcaattaaccctcttttctttataaatgacccagtttcaagaagctctttatagcagtgtgaaaatggacaaatacgaccactttggaaaaagagttttgtagttttttttttaaaagttaactatgctggtatacaaaacacctaacccaactggagcaaatatgacacttctagtagttatacataagaattaaggggaagaggaagttaaagagtggttgattcatgggtactaatatacagtttgatagaggaaataagacagtgtttgataaatcagtgactataatttataattattttatatatcaaaattgcttgtagagaataatgcaaatgtgcctagcataaagaaaagacaaatatttcaggcaatggatgtatcccaattacatctgcaaatttcctgttaccatggtaacatattcaccggtttctgggattaggatatggacatttggcaaggaggaggcattattctgcctaccaaacatgtatgtaaccattaagatttggggtcatatttactgttacagcatagcctagcctattgtgattaatagagaataatgcaaatgtgcctaccataaagaaaagacaaatatttaaggcaatggatgtacccaattacactgatttgatatttatcaaatgcaagaagtttacgtgaattaacttattacatgtatttcgaaaatatttacatctattatgtatcaataaaaaataaaattttaaaaatagttgtgaggagtttagtcatctggagcgtggctgtgttttgtaatgaggatgtaataatgaaataaggataatgagatatattgagaattttggggtagatcaacatgatagaaccaccatttgcttcaaaagttactgtatgtatttttatttttatttttttgagacggagtctctctcactctgttgcccaggctcaagttactgtatgtatttttatatacatttttagggtatactttttacaaagaccactgggatttattttatattttggaataaacaaaagtagttctattctcaaatgtataactaatttgtttaggatctattttaggttgcttaactctttggcatgagtttgcttttgtgtaaaataggtattttaacatatttcttatcttacagagtaattgtaaaggtgaaataacatgctggatatgtaactggcttgaaaattataaaatgttgattaaatgcaaactattgtattcaaacaactattaattttatcaatttcatttatatgattattaagaatattaaaaggtctaaaataattaaatctaactgtggtcatttgccattattaattattaggtaatagacaccataatgactaaataactcaatctgtagaaataaaagaggaatagatattacttatatacttttgaaaatgtttgctttggctttattccagtcatcctggaaaataattctgcatagggtaaagttgcaaagattactgaaaatctgcttttttaagtgcttcaggactgtttttctttaaaccctaacacttattttataaatactcccttggtcacaagaggtaataattattgcaataatagttttaagttctgtaatatataccatatgagaaaacaggatgtgtcaaaaacagaaatctcttcaagaggtgaatgctagatcacccttttgaaatcatgcttcaatagttatccatatgctttagagaaaaatttggcaagtttattaaaatcagtgggatagagtcacctaatttcagatatgctgaactagacattgtagtttgccaattatattaaattataattagtaaaaataacaatgctttaaggtttgggcaaaatccaaagactcacaaatgttgaaataacaaaactggagattgaacatgaaaatggttctcaaattataacaatgaattatgaattacattgttcaggttttactcaaatggaaactctttggctgcttttagatactgattttttagtaaataaagtgtttaactaaagagttttgaaaaacctgggacacatttaccatcttactataaacccagctgattaagacattaatttttgaggtaataaatatatgtagcatagaacccttctctaacacctaacacatattatgtcctatacctatctatttaaatgtccatttattcttatacaactgtgcactccaaagaaaggactggtgttctattcatctttgtatctctattcccagaaaaagttcaataagtgccataatcccaagtgtaaataatgtaaatcaacagccatttctaagcttgaaggtttggtgctgaacactttacacatattacctaattgtatcttcatataaatgctatgaaatatttaatggtttttctaattatttataatgatgacaggtaagcataaatattacatattcacttcagattaaactttaatactatatttaacatctatattttaaaaatcagcataatgaacactgtggaaaaatagttacattttaataggtaaaattaaaagtaatggcaaaaaccaccattacttttataccaacctactatatgattctgagaaaatcaacttaatgaaatatttcagaaagtagagaaaagacatcagaaagatcaaattctaaaggataatacaaaaggcaaaggaatgcagatcaattctaagaaaagtggctgggcatggtggctcatgcctgtaatgtgagcagtttcagaggctgaggtgggaagattacttgccatgagttcagggccagcctgggcagtctagtgaaacccttcctttataaaaaaaattaaaaataagccaagtgtggtgatgtgtacctgtagtaccagctacacaggaggctaaagcaagtggatcgattgagccaagaacttcggggctgcagtgagctaggattgagccactgcattccagcctgggcaacacagtgaagccctgtctaaaattaaattaaattgaaatatataaaataaaataaaatcataaattactactggaagaaaaacaatcagacatgtatttgtgttgtaatcttcataagaataaacttcctgtatttgttttcagttgttcctataacaaattatcataaatctatagtgagttaaaaatacaaaaaaaaaaaaaaaaaaaccccacattattatctaacagttctggaggacaccaaaagtacaaacagttctcacagagctaaaatcaagatgatggcctatctgcattgtctctgaagactttagaggacaagatgttccttgatttttacagcttctagaggctgcccacatcttaattcatgagcacattcctccaacctctgcttctataaccacatacacttcttgactttgaccttcccatctccctcttaggaggatccttgtgactatagtggggctacccaggtatgccaggataatctcttcatctcaagattcttaacttaatcacatctgcaaatttcctgttatcatggtaacatattcacaggtttctaggattaggatatggacatctttggcaaggaggaggcattattcggcctacacatatttatgtaaccattaagatttggggtcatatttactgttaaagcatagcctactctattgtgattaacaaactaatcaagttttattcaccaaaatgtcaacatgaaaatctttgtagatatgcaatggctcaaatatgctatgattattccccctcttaaaaacatacaattgaaaacatacctttttatttgagaaataaacaaaaatttccaactcaatactgtagccatggtttaaatggacttatcaggcatggacctcaaatttaagaactggtgtgcaacagctcacccaatttttcttttactgcttttgtttcagtccccacaccaagagtatacttgctagaacatattcctctgttcataattttccctgactttcttattttgacaagtatgaaagaacaaacagctggtgtgttctagactcagaattgctagatcgaatttggcctttcaaatggttgacagaacattcttttgaagaatttctaaataaaaattgtcattctttttcctctcagtgttttatgaggcaacataatgactatctactttgttgaagaacctagaggtaatattctgcatgttcaaatcctatggtaaatttcctgctcactgagttacagtcatcgtcaaaatactgaaatctgtggcagctatcatatgttcttttattattatctttccacatatttgcttctgttaccatattggtcagagcacgttaactactttagcaaacaactccaagtcttattggtttcagacaatttagctttactgctagttcatgtcatggtctgaagcagactggcactatgggagtatgtaccagtgagcttagccagccataataagtaccacagatgggggagcttaaacaatagaacattattttcttacagttctggaggattagaaattcaagacaaagatgctggtcaatttgatttctaatgagggctctctacttggcttatagacagttgccttctcactatttgacgtgtcctcaatggtggagagaaagacagagagagagagatctctttttcccttttcttttgttattcttattattaatttttgtggttatatagtaggtgtatacatttacgtggtacatgagatgtttcaatacaagcatggaatgtgaaataagcacttatgaagaatgggatatccattccctcaagcatttatcttttcagttacaaaaaatccaactatactctttatttgaaaatgtataattgttattattgactatagtcaccctattgtgctatcaaatagaggtcttattcattctaatttttgtacccattaaccatccccacctccccctaaatcccgcagtacccttcctagcatctggtaaccatccttccactctctgtgttcatgagttcaattgttttgatttgtatatcccataaataaatgagaacatgtgatgtttgtctttctgtgcctggcttattttacttaatattatgatcttcagttccacccatgttgttgcaaatgacaggttctcattctttttttaaatggctgaatagtgctcccttgtttataagtactacattttctttatctattcctctgttgatggacacttaggttgcttccaaatcttaactcctgtaaacagtgctgcaacaaacataggaatgcagattctctttgatatactggcttcctttcttttgggtatatactcagcagtggtattgctggatcatatggtacctcaatttttagtttttttgaggaatctccaaacagtgctccatggtgcctgtacaaatttacatgactacgaacagtgtacaaggattcctttttctccacattctcaccagcatttgttattgcctgtcttttgaagataggccattttaactggggtgaggttatatgtaatttgtagttttgatttgcatttctttgatgatcagtgatgttgagcaccttttcatatctatgtttgcctttgtatgtcttctttgagaaattcctatgaaaatattgtgcccactttttcattgaattactagattttttactacagaattccagatctagaggataggctttcagttattccccattctttatgataactagctgtgagtccgtagaatatggctttaattatgatgaggtatgtttctcctatccccattgatagtgaatggtctttctaatgtatggttgcatttggtttgcgagtattttgttgagtatttttgcatcagtattcatcagatgtattggtctgtagttttctttttttgatgtgtctttgtctggatttcatatcagggtaatctgggcctcatggaatgagtttggaagcatttcctcctctatttctcagaataatttgtgtaacattggtattagttcttccttaaatgtttggtagaattcagcagtgaagccaccaggtaccgggcttttctttactgggggaccttttattagagcttcaatctcattacttgttattggtctgttcaggttttggatttccttttggttcaatcttggtaggttgcatgtgtctaggaatttgtttatttcttctatatttttcaatccattggtatatatttgctcagagtagccattaatgatccattgaattcctgcagtatgagttgttgtgtctccttttacatttctgatttcatttgaaacttatctttttttcagttaatctgactaaaggtttgtcaattttgcttagggtttcaaggaagcaactttttgttccattgatcttttttgttctttttttcatttcaattttatttctttctgctctgatctttattatttattttcttctactacttttgggtttgttttgctcttgattttctagatctttaagatgcattgtcagattgtttatttttcttcttttcttataaggccaccaattctatcacattagggcctcaccctaatcttaattaccacctaaagacctatttccaaatacagtccctatgggggttagggctttaacatataaatttgatgggggtgggggtaagtgacaacatttagtctatagtggagtgaaagggtctactccattagagtttaaattctggctccttaatgtttgtattatctaccattttctcagacatcagaactctttactacatcctcatcattgtctgcagtaaagggatgtggagcaccatgggatggcccagaagaatttagatcctacctgaaagcagtgtgtgccactttaacccactacataagtctggctagaacccagacttgtggccacacaagaaattcagttgagaaattcagtttagacatggaaccaagtagagaagagaaaataggcattgatgtataccggcagtctctgcttccataactcttctttaaaaatatgtatatttaggaagccactaaaaaaactatcagaactaagaaatgaactcaacaagcttgcagagtataaagcaataaacaaaataaattttatttctattgatgaataagtaacaaaattaagaagataatcccattaagaataacataaaaataataaaatctttaggaatgaatttcattaaaaaaattcaaaatgaatacagaaaaatcaactgtatttctacacactagaaatgggcaatctaaaatgaaatgacaaaaatgattttattttccataccatcaaaaagaataaaatacttaggaataaatgtaaaaaagaagtgcaaaataaatattgtaaaaactactgaacactgttgatgaaaactgagaaacatctaattagaaacactcatgttcatggatcacaagacaatattgtgaagaatggcaatacatttcaaattgacctacagattcagcaaaatgtcgatcaaagtaacttatggcttttttgcagaaattgacaggctaatcctaaaattcacatgaaaatttaaaggtagccaaaacaatcttgaaaaaggagaacaaagttaaaggagtttcactttttcatttcaagacttatttcaaagctacagtcatcaagacagtgctgtagtggcataagaatagacaaatacattaatataatctaattaagagtccagatgtaaacccttacaatttgcagccaatttatttcaaacaaggatcccaacacaattcaatggggagaataacagacatttcagcaaaaggtatctacatgcaaaagaatgaatttggtcagcttccttatatttcaagtggatgaaatctaaatataaaagctataaaattcttgaaaggaaacataggcatacatcatgatttgaggtaaaaaaaagaaaaaatgataatttgaactttatgaaaattgaactttcgagttgcaaaagaatatcatcaagaaaatgaacagtggtccatttttcactgctccatgtgctctgttgcaggagatcaagataactccaccacagcgtctgtcaccctgtgaccaacaggtagccaaaacaatcttgaaaaaggagaacaaagttggagggcttctactttttactttcaaatcttactgcaaatctacagtaatcaagacaatgtggtactggaagcagggaaatgatggccaactagagacaaaagatgcaagcttccctcagaaagatcaaaattataagtgaatggtcattccaggagtggaaagctgaggaaagagtgctgaaacctgtcagacaacccatgggaagaagctggagtgcagaaagggaaggcagcaagaatctggcagagattggactccagggaacctggagtcccatgcaaaggataggggtgggtattcttttctctcctctcccctgcaacaaactgctgaccactgaattgtccaggagcctctctgccctcttgagcccaggactcaaggactactgtccttgacaatttgcgagcttcctgggggcagagcaccaggtgaccagctcctgcaagtgcactagcactccgtcatacccaaattgaggcagcagacactgtactggttgtgcctccatcaaggacaactacctggggaatctcagggttgccttatccccagatgccccacaaatgttctccagaatctgctctggctttggcagtcatgggggaccagtgattccctggagatctagcccttaggatggacagcccctaggggaggggagcgtgcctcaccaaatcccccttgggataaaggaatcacagcatagtgcagttctcccaagaggggaagcattgttctgtcccagctgtactagtttgttctcacactgctaataaagacatgcctgagactgggtgatttatgaaggaaactggtttaatttgactcacagttccacatggctggggatgctccacaatcatggcagaaggtgaatgaggaacaaagtcacgtcttacatggaggtaggcaggagaacatgtgcaggggaactcccctttataaaaccatcagatctcataagacttattcactatcacaagaacagcatgggaaaaacacacttccatgattcaattacctccagccaggtccctcccacaacacgtggggttattacaattcaaggtgatatttgggtggggacacagaggcaaaccatatcaccagcagacaagcagcactagtggctgggagcagacatggagagggtaccacctcttactccctcacactgctgcagacacagctgaggcctttcctgctgggggctggcacaagtgcgcttagagacagcctttccagtgctattcatggctgctgcacccaggttgaaagtgtgcttgtggtcctgggtgtcaggaagtgtaggataatctcctgctccctacaccaagtggcagcattcctgccatcgagggcagcttcagagctcctttttttttggattggggggaaggtgttctgccctgagtccatgtcagaggtagccacaagaggggcatttcccacagacctcagatgcattgaggcccagagagaaaggacagggtatatctaaactgaagttcatgagccctattcactaacaggggcctgatagtgaactaaatcatgtttcttcctgctcaggacaaagagctgagacagccccttctctctcaccccagacctcagtgcctcccaccaagaacttcctctgctatcctgtcggggtgggtgcttccactcatcatcagtgttcccgatggcaagctaacccttgctcttaaatcaccacctactggactggagaccaaactgcaataccaaataaaaaccttgctgacagaaggccacagtaccagggtacaaaagaagcttcctgagacacctgcattcccagccccacagaagatagtgagtcagctcatccacccagtacatagctacaacaagtagaatttgaggaagccatgaggcaaaagctatctataacaaatgaacccacacagagccttggtcccctgaaagcacccagaaacaaagccaaatgatcacatacaacatacattacagtcagcccctcaagggagaaacattttttttaaagtcccaattaaatgatagcaattccaaaaataagaagtgacagcttcttcagatgagaagaaatcagcacaaaaactcttgacaatacaaaaagacagagtatttcaacacccccagggaactatgctagctctatggcaatggattctaaccaaaatgaaacttctaaaatggcagataaagaattcaaaatgtgaattgtaaggaagctcagtgaaatccaagagaaagttgaaaaccaacagaaataaaccaaaaaggcaatttaggatatgaaagatgtgatagatataggttaaaaaaaagaaaaaaaaaacagaacctctagaaatgaaaaattcagtgaagaaatttcaacttacaattgaaaactttaacaacagattagaacaagcagaagaaagaaatgaagagcttaaagaccagtcttttgaattaacccagtcagacaaaagtaaagaaaattgaatttaattaaatgaacaaagactttgagaaatatgggattatgtaaagtgaccaaacctatgatgtgtaggcatttctaggagagaagggcattatataataataaaacattgaaaacaacaagcagattcaaccatcttaaatagataagcacccaaccctggagcacatggattcataatacaaatactattacatctaagaaaagagatagatggcaatacaataatactggagaatttcaacatttcactgacagcactagatagatcacagagacagtaaatcaacaaaaacaaaaacaacaaaaacctctggacttacactgtactctagaccatatggacctaatattcatttgcagaacactcaacccaacaaacacagaatatacatttttcccatctgtgcatggaacattctacaaaattcattgtatgcctggccataaagcaagtctcaataaattcaaaaaaaatcaaaatcttatcaagtatcatctcagaccacagtgcaattagaaatcaataccaattagccagacgtggcagtgcgcacctgtagtcctagctacttgggaggctgaggcttgaacctgggaggcagaggctgcagtgagccaacatcgcaccactgcactccagcctaggcgacagggtgagactctgactcaaaaaaaaaaaaaaaaaaaaaaaaaaaaaaaaaaaaacagaaaaagaaatcaataccaagaggaattctcaaaactacacaaatacatgaaaactacaacacttgctcctcattggcttttgagtaaataactaaattaagacagaaattttaaaaaaattaaatgaaaacagagatacaacagaccaaaacctttgggatacagccaaaacagtactaagaagaaagtttatagtgttaattgcctattttaaaaagatagaaagatttcaaattgacaacatgatattgtacctcaaggaaacagaacaacaagaacaaaccaaatccaaagctaacacagaaaaggaataacaaagatcagagaagaagtaaataagattgagaccagaaaaatgatacaaagaatcaagaaaatgaaaacttggttcttccatagaatgaaaaaaattgatagaccacaagctagattaaccaagataaaaagaaagaagattcaaataagcacaataagaaatgataagggtaatattacaactgataaactgataccacagaaatacaaaagctcatcagagactacaatgaacatctctccatctctacatacacaaaaccaaaaaccgggagtaaatggataaatttctggaaatatatcaaccatcaagaatgaatcagaaataaataaatatcctgaacaaactaataatgattaattaaattccaacagttatataaaatctctcaacagaaaagcctaggaccagatggattcatagctgagttttaccagatgtcaaagaggagctggtacaaatatttctgaaagtattccaaaaaattgaggagaaaggctcctccttaatgcattctatgaaaccagtatcaccagataacaaaatcactcaaaaacacaacagaaaagataacaataagccaatatccctgatgaacatacatgcaaatattctcaacaaaattctagcaaactgtattcgtacattttcacgctgctgataaagacatacctgagactgggaagaaagagaggtttaattgggcttgcagttccacatggctggggatgcctcagaatcatgatacaacagatcatggtgggaggtgaaaggcacttcttacatggcgatggtaagagaaaatgagaaacatggtaagcagaaacccctgataaaaccatcagatctcgtgagacttattcactatcatgagaacagtattgaggaaactgcttccatgattcagattatctcccaagggatccctcccacaacatgtgggaattataggagtacaattcaacatgagatttgggtggggacacaaagccaaaccatatcgttttaccccgacccctccaaatctcgtgtcctcacatttcaaaaccaatccctgcctttccaacagtcccccaaagccttaactcatttcagcattaacccaaaatttcacagtccaatgtctcatctgagacaaggcaagtcttttcagcctatgagcctgtaaaatcaaaagcaagctaattactttctagatacaatggtggtacaggtattgggtaaatacagccattccaaatgggagaaattggcccaaacaaatgggctacagggcccatgccagtccaaaatccagcgaggcagtcaaattttaatgctccagaatgatctcctttgactccaggtctcacatccaggtaatgctgatgcaagaggtgggctcccatggtcttgggcagctctgcctctgtggctttgcagggtacagcctccctcccagctgttttcatgggctggagttgagtgtctgtggcttttccaggtgcaccgttcaggtggatctatcattctggggtctggaggctggtggtcctcttttcacagttccactaggtggtgccctagtaggaactctgtgtgggggctgcaactccacatttctcttctgcactgccctagcagaggttctctatgagagccccactcctgcagcaagcttctgcctgggcatccaggtacttccatacatcttccaaaatctagacagaggttctcaaaccccaattcttgacttcgttgcacctgcaggctcaacaccatgtggaagctgccaagccttggggcttccaccttctgaagccacagcctgagctctacattggcccctttcagccatgcctggagcagctgggacacagggcactaagcccctagagtgcacacagcacagggaccctgggccctgcccacaaaaccattttttcttcctagacctctgggtctgtgatgggagaggctgcaacaaatgtctctgacatgccctggagctattttctccattgtggcttggggattaacatcaggctcctcattacttatgcaaatatctgcagctggcttgaatttctcctcggaaaatggaattttcttttctatcacattgtcaggctgcaaattttctgaacttttatgttctgcttcccttttaaaatcgaatgcctttaatagcacccaagtcacctcttgaatgctttgcttcttagaaatttcttccatcagataccctaaatcatctctctcaagttcaaagtttcacaaatctctagggcaggggcaaaaatgacaccagactctttactaaaaaataacaagaatcacctttgctccaattcccaacaattttctcatctccatctgagaccacctcagcctggactttattgttcatatcactatcaggcttttagtcaaagccatttaacaagtctctaggaagttttacactttcccacatcttcctgtcttcttttgagccctccaaactgttccaacctctgcctcttacccagttccaaagtcacttccgcattttcaggtacattttcagcaacactccactctactgctaccaatttactgtattagtccgttttcatgctgctgataatgacatgcccaagactgagaagaaaaagaggtttaattggacttagaatcccacatggggagtccttagaatcatggcgggaggtgaaaggcacttcttacatggcagcagcaggagaaaatgagaaggatgcaaaagcagaaacccctgataaaaccatcagctctcgtgagacttattcactaccatgagaataacagaagggaaactgctcccatgattcaaattatctgtcaccaggtctctcccacaacacatgagacttatgggagtacaattcaagatgagatttggttgggggctcagaactaaactatgtcacaaaccaaatccaacattacatgaaaaagaaatacatcacaatcaagtgggtttttttccagagatgcaaggatagttcaacatacacaaatcaataaatgtgattcaccatataaacagaatttaaaacaaaaaccacataatcatctcaatagatgcagaaaaagcattcaataaaatccaacttctcttcagatataaacactcatcacatacaaatcagtagaacttaccttgaaataataagggccatgtataacaaaaaccacagccaagatcattctgaatatggaaaagttgaaaacattccaaataaatacctgggacaaaagaagccggtacattcataccactcttattcaacatgatattggaagtcctagccagcgtaattatggaagagaaaaaaataaaaggtattcaaattggaaaagaaggagtcaagttatctctgtttgatgatgaccttatcttatagctagaaaaccccaaagattccttcaaaagactcctagaattgataaatgactggtaaagtttcaggatacaaaatcaatctacaaaatcagtagtatttatatacaccaataatgttcaggctgagagcaaaatccagaatacaatcccatttacatgagccacaaaaaaaattacctagaaatatatttcaccaaggagatgaaagagttctacaaagcaaacggcaaaacactgatgaaagtaaccatacttggaacaaacaaatgtgaaaacatcccatgttcttgggttggaagaatcaatatcattaaaatcatcttactgcccaaagcaatatacagattcaattttattccttttaaattaccaacgtcattttttgcagaattagaaaaaaaatcctaaaaatcatatagaaccaaaaaaaagagcccaaatagcttaaacaatcctgagcaaaaatggactaagccaacaacatcacattacctgacttcaaattatactacaaagatatagtaaccaaaacagcagggtactgaaacaaaaatagacacatagacaaatggaacagaatagaaaatccagaaataatgccacatacctacaaccaactgatcttcaacagagatgacaaaaataaacaatgtaggaagaacaccctattcaataaatggtgttagaaaaattggttagctatatgcagaagaatgaaactagacccctatctctcaccatatacaaaagttaattcaaggtcgattaaatactttaatggaagatcagaaactataaaaatcctagaaaaaaatcaagaaaaaacttctccggacattgccttaggcaaagaatttataactaagccttcaaaagcaaatgcaagaaaaataaacaaaagaaatttaattaaactaaaaggattctgcacaacaaaagtactaattaacagagtaaataaatgagcaccctacagaatgcgagaaaaaatttgcgaattatacctctgatgaatgactaatatccaacaactcaataccaactcaacaagaaaaaaacaaataaccccattaaaaaatggacaaaggaaatgaacagacatttctcaaaagaagacatacaggcagtcaacaaacatatgaaaatataatcagcattactaatcatcagataaatgcaaattaaaaccatagtaagataccatcttacagcagtaagaatggctattattaaaagttaaaaaaaaacagatattggcatggatgcagagaaaaggtaatgcttatacacagttatgggaatgtaaattagtaaaacctcaatggaaaacagtatggagacttttcaaagaattaaaaatagaactactagtcaacccagcaatcctactattcggttctacccaaagtgaaataaatcattatatcaaaaagacacctatattagtatgtttattgcagtgctatactcaatagcaaagtcttgaaatcaacctaaatgtctctcaatggttggttggataaagaaaatgtctcacaccatggaatgtacacacaccatggaataatatacagccattaaaaagaataaaatcatgtaatttgtagcaacataggtggaactggaagccattatcctaagtgaaataactgaaaaatataaatttaaatattacatattcttagaatttggatctgaacaatgggtacaaatggacataaagatgaaaaaaatatacattggggactctaaaatggggcaaaatgggagacggaatgagggttaaaaaattacctattggcacagtgttcactattttggtggtgggtactctagaagcccaaacttcaccattacacaatatattcatataacaaacctgtacatgtatcccctaaagctaaattttttttaaaaagaattatttatttaaaaaaagaaaatgaaaagaacaactacaaaccaaatgggataaaatattttcaaattatatataattcaaaatatgtaaataatatataaactgacttcccaatttattctatgtatcaaatattacactgatattaaaaccagatgaagacattagaagaaaactagagaaaataactttagccaatatagacgcaaaaatcctcaaaaaaatcctagcaaactgaatatagcaatacataaaaatatttatacaccatgaccaagtggggtggctataataaacaagagacaatcaatcacaagtgttagcaggaatgtggagaagctgaaacaaccatatattgcttgtgagaatatacagtaatgcagtcactctgggaaacagtttggcagttcctcaaaatgctaatcttagttaccgtctgtttctttggttgagtagtgtttttgtgtgtttaaacatatttatgtttaaaagacaagttacttaatgacatttgattttacactaggttcaaacagtatttgtaattcattgtggataaaatttgctattactagaatgttttgtgattttttatgcaaaaatgcatttcaagttcaccacacagcttaaatttacatcattaacttacagaatacaacttttaatgcattttatattgcctgcatactgccagtacaaattttccagaaagtgtttctaaaattattaatgtaagttatcagatagtctaacttaatcatgtagaggcatcaaaattcatgttatttacaaagtagtctaatttcctccaaaatacaaatattaaatcagtatattatattcaataaaactataacctcatgttagatctcaaacttttatgtgtttatataaatatagaaacatatatatctatatatcctttagttctagcattaaataaagataattgcagaaagcctttctgctaagatctggaacacaatagggattcacactgtctccactgttattcaacatagtactgaaagtcctagccaatgcaatcagacaagatcaagatataacgggaatccaaactggaaaggaagaaatcaaattacctttgtttgcagatgatatgatcttatatttggaaaaaccttaaggctctaaaagaaaactattagaactgataaacaaattgagtaaagtcaaaggatacaaaatcaacatacaaaaattagttgcatttctatataccaaagtgaacaatgtggaatggaaatttaaaaagtaatcccatttactgtagccacacagaaaattaaatacctaggaattaacttagccaaagaagttaacgatttgtttaatggaaactataagacactgaagaaagaaattgaagaaaacattgaaaaaaattggaaaatagtatatgttcatggattggaagaatcaatattgttaaaatgtccaacaatgttccaaagcaatctgcaaattcaatgcaatccttatcaaaatatccatgacattcttcacagaaatagaaaaaaaatcctaaaatttatatagaaccacaaaatacccagaatagccaatgcggttcttggtcaaaaggtgccaagaacatacactggggaaaaggcagtctcttcttcaacaaatggtgccaggaaaaccggatatacacatgcaaaagaatgaaacaaaataccaatgaaaccttggtattttgataaggattgcattgaatttgtagatttatttggaacatttttggacattctaacaatattgattcttccaatccatgagcatagactattttcccatttttcagtgttttctttcttcagtgtcttatagtttccattatacaaatcgttcacttctttggctaagttaatccctatctctcaccatatacagaaagcaaatcaaaatggattaaacaattaaatctaaaacctcaaactatgaaactactacaacaaaacattggggaaatttccaggttattggtctgatcaaagatttcttgagcaatactccagaagcacaagcaaccaaagcatatatgaacaaatgagattacatcaagttaaaaagcttaagcttaaaaagctttaaaagcaggaatatggagaaactagaacaaccatatattgcttgtgagaatatacagtagtgctgtagtgtgcagcaaaggatacaatcaacaaagtgtagagacaactcacagaatggaagaaaagatttgcagaccacccatctgaacaagagattaataactggaatatataaatagctcaaacaattccataggaaaaaatctaataacctaatcaaaaatgggcaaaagattttgaatagacatttctcaaaagaagacatacaaatggaaaacaggcatacgaaaaggtgcccaacatcactgatcgtcagagaaatgccaatcaaaattacaataagatatcatctcaccccagttaaaatgacttatatgcaaaagacagacaataacaaatgctggctaggatgtggagaaaaagaaacccttgaacactgttggtggcaatgtaaattagtacaactactatggagaacagcttggagattcctcaaaaattaaaaactgagctaccgtataatctagtaatcccactgttgggtatataagcaaaataaagaaaatcagtatgttgaagagatgtttgcacttctatgtttgttgtagcgctctttacaatagctaatatttggaagcaatctaagtgaccatcaagagacaaatggataaacaaaatgtggtacacatacacaacggaatgctattcaattataaaaaagaatgagatccattcatttgcaacaacatggatagaactggaggtcattaagtgaaataagccaagcacaaaaagccaaacattgcatgtccttccttaattgtgggatcttaaaatcaaaacaattgaactcatggacatagagtgtagatggatggtttctagaggctgggaagggtagtgaggggttggggaaaagtttgggatggttaatgggtacaaagaaaataggtagaaagaatgaataagacctattatttgatagcacaatagggtgactacagtcaataataattgtagattttaatataacttaaagagtgtgattgtattgcttgcaactcaaaagattaatgcttgaggggatggatacaccattctccatgatgtgcttatttcatattgcatgtctatattaaaacatttcgtgtttttcatgtttttcatcaaaacatttaattcatcctataaatacatacacctactatgtactcacaaaaattgaaaataaaaataatcatatatttttgtaggtatataagctcatgaagttattttaaaatctacaacttattgatttatacatatacaccatggaatactacacaaccacagaaatgaatgagatcatgtctttaaaggggtatggctggagctggaggtcagtagtctcagaaactcacaggaacagaaaactaaataccatatgttctcacttataagtgggagctaagtaatgaaaatacatggacacatagtggggagcaacacacactgggcttattggagggtggaggatgggaggagagagaggatcaagaaaaataactaatgggtactaggcttaatacctgggtgataaataacctgtacaacaaaccctcatgacacaagttgccttatgtaacaaaactacacatgtagccctgaacttaaaataaaagttaaaaaaagataattatacctttaaaaattgttataaaatgatcaataaaagctctcgccagttgcaattgttgctagagttctttaatcaatagaacaagaactgttgtactttattaaataccaacatggtaaaagtttatatttttattgagccttgccacatagacaaagcattcataccaatcatctcatttgcttcactcaatattcctatgaggcaggggtagcatctaatatttttattttctacataaagaagcagtttcacagtagtttgacgatttatccaaattcaccccgttacattttggtgaactgtggaggagggaggataactgaactgccttctctcagatctacattgtgcccatctttagctttactgcatttttcaggaacttacattgtttatgaagcccttggcgtcaggtttccaggttggatctgaaacagaaggctggatgcaatgattgtaattctagaggcaggagatagggcatttccctttctctcttcttcctgtgatgtctctggttgtagctgcttcctctgtgcctctagctcttttctccagcccatcactcctatttacaagcagctgggaggcagccatgatttctggattccaatggtaacaacacctgctctcactgaccttcaggtgtgatgttaacagcttccttgttgttgctgatttctgggtggccccgctctcaagtcttttccccaattcctgtatcaaataacctcagtttgaaaaacctaaagtggttttatttttctgcctagatcttaactgctatttgaaaatataccaataagctttccatatttcaaattattaatctcaacccaatgtttctatttcatgaaatagtgtttttccatcatttgcttagaataaaaaatagctatattttactgtcctttattccttctgtattactgatgtatactctatgggcttactacgattgtgttgtatttgagtttcttaaggtgtttttcattacatccctttgattataataaaagttaatgtgataaacaaaatggtcaatgtagtggttaagataaaggacagaatataattcctctctgcctctcaaaagctgtaggaagttgagttactttgtctctcagcttggtattaataggaataatagttcatatgactgagaattattgtgaagaatgaatgaatgaatatgtgaaaagcacatgatgtattgcctgttacatagcactaataaaaaagtagaaatttttagccaggtgctgtggctcacgcctgtaatcccatcactttcggaggccaaggcaggcagatcatgagatcaggggatcaagaccttcctggctaacagggtgaaaccccgtctctactaaaaataaaaattaaaaaaaaattagccaggcgtggtggcacgagcctgtaatcacagctactcgggaggctgaagcaggagactcgcttgaacccaggaggctaaggttgcagtgagctgagatcgcaccactgcactccagcctgggtgacagagtgagactctgtcttaaaaaaaaaaaaaaaaaaaaaaagtagtaatttttaaagtattatttgagaatttggagaaaacagaaaacataaagattattgtgactgacataattatgaatctagaaccatttattttggattgtgagaatttaaatcgttaattaatgtatatgtgtacatgtatatagtgtgtgtgtatatggctgcaaataatatttatgtaaacatatagcattatataacgaaattttaatccacttttgtaaaatctttccattttaaacttcaggaatttaagaaaaaataatatgcatctaaagttttaataccttaaaaaatacattacttgattaaaacaaaattaatttcaggccaggtgcagtggctcatgcctgtaatcccagcactttgggaggccgaagtgggcagatcacgtggtcaggagatcgagaccatcctggctaacatcgtgaaaccccatctctactaaaaatacaaaaaattagccgggtgtggtggcaggtgcctgtagtcccagctactcgggaggctgaggcaggagaatggcgtgaacccgggaggcggagcttacagtgagctgagattgcaccactgtactccagtctgggcaacagagcaagactctgttcaaaaaaaaaaaattaatttcaaagtgtttgcaaaaaaaagcattttacgaatgccaaatgtattactgaagaacaacaaaataattcaagtaaaggaggattttactaccttggatttattataagaaaatgcaagggtcttcagctatggagaaaaccctgggaaatataataaattagacaatctctttatgtaactcttttgctttttcttttcttttttttttttttctttttttttctattttgagacagagttttgctctcgttgccaggctggagtgcaatggcgcgatctcagttcactgcaacctctgcctccccgggttcaagcgattctcctgcctcagcctcccgagtagctgggattacagggatgtgccaccaagcctggctaattttgtatttttagtagagatggggtttctccatgttggtcaggctggtcttgaactcccgatctcagatgatcggcccgcctcggcctcccaaagtcctggcattacaggcgtgagccaccacgcccggtcctatgtaattcttttgctagatgagctagattagtgcataatagtgatgatttggttatttctgaagtactgcttcttttgtctgttccagtgttgtgtcatagaagatcctttgacaaccatttgcagaaagttctttaaaacaacaacaacaacaacaacactgaaaatggcacttgggaaaagatgccttttatctaaggctggagagaaagaaaagtccaagaacatggcagaataaaacagaggcttagggacaagtctacagatggaatcagccagaagcaaattctattcttcctgcatcaaatacaaaagaaagtaaaagtgatgaagccaaggatctatacaactatgaaaattcatagtaattgcaggaactatcccaaaaagcaaacttgaaagcaacttcaagttctgaatgacaaaatttagcagtcaattgggacactgaattaataaaagatttatattatgcaagctacagctgacgtccacattgtagaaacaagcgctctcttctgactcgttccaagtatacattatttttaaatcatgtcttaaaatttagccaaaatggaactcgagagagcattatgtaaatctcacttcttgtttcaattccctcaaaagtccctaggtcccatatcagtaaaggctacatatgtggaataaggtttataatgtatataaaacagaaaccttcactgtaacaatagaacaatagtcatccttgatttgctgctttataacctacctactacgtttatgcagggttacagcggggctctgtaaataatcccacaaactccaaggagtacgagtctttgtgtggaattcaagatgttaattttttcttttctaactaaattaactccacatgttttttgctgcaactaatctctttcctgtggaattaggcatggtctgactcattatttactttttgaacatgacaatttactccagagtagtcctcatttcacatagcctcaggctcctaggccatttatgtgcacccagcattattgctgatctttgtagttaagatgtggattctggaaggaaatcataagaccaccaatatccagactaatgcaactcggccagccatctcgtcaatggcaggctttagatagtatgtgtctggggagaaataatttctaaggtgtctacagaactttaggactgataaagttctcccaaacattcctaaaatgagtaagatttatattaattgagactgtcctaaacatcagacctttatccttacttacgatattggtaatcctaacaatgataaggtggaaaatataacccattttcaacatgaagagacactcatacagctaataagtaacagagcagagattcaaaaccagcttctttgacgccaaagccaatgctttgaaatgaagcatttccatcatttcttttcaaagtagcctgtggcagagacaagcagagatcactgtgacccctcagagttataaaccaaagctcataaaaataaattgacttattaaggcctcagagcttagagatagaatctgatccacagcctgactataaggattctctgtgctgtgcttatttattttttccaccattaaatttacttaaatcatttagctgaaggtccaacttaggacactatgaagtgttcttaggtagagaggaaggatagtggaagggagagagaaaggagacgagaggtgaaacatgaattttttaagtgaagaatctatgtgctatttgttttgtatccataacaccgtaacattcatagtaggtagcatggtgtcctgaacatagcgacaatagacatttaatgactatataagttaggtgaataaaaataagaacccgtttgtaatttttttcatctatttgttttcataataaagacctcattttttattatgatgattgcctgaatatctgtataccttggtttagttctgccccacctttaatttcagctgtgtcacagtgaattgctttcaccttcctgaacttgatttttctcatgaatataatatagaagttagattaattaagtttaaaatgctttcaaactaaggtgtatctgacatagacaatctttttcaaaaaatgtttcgtcgtaggatgacaatctggtagtgaaatttccagccatatgcagatattgattatattatatgtgatctcaaacgtttccagcaacttggtacaagatagcaacaaaacttctgatgttcttaatatttgctaagcacctgtttatttttcatttattctttatttcagcaaggaattattgaaagacccctatgtgaaagtgctggattagaagaatttcaagacaacaatgactggtgttctgaattacacacaagatgccacagaagggaaaaagatgtgtttaatgatatttctcattcaacaggatagataacatttggacttgaagggagagtagctgttctcttgcagcaggtagcaagagctggccagccaaaagggcagcatgtcatgataactttgggggataccaaatttctcagtatagccagtgcagagggggttaatgagggtagagcagataatgctgagcaggtaggcaggcccaaggcctaaaggatcctctacaccactctcagtttttctatcatattgtgggttataagcaattacttaagaacttttggaagatgagtgacataattatatttacattttgaaaaatcaatatggcagtcagtggagggatgaggaatggcaaagtggaaaggaacccagtcgttgagatagataaggtgggaaaacctgaaggtctcaactgagattgtcacttaggcacaggaatgatgcatgagactttctgccatactcaacctgatccaagcttcccgtcaggtgtcataccaaagaatagcctggtatgttttacattaaaatacattttctgaaacaaaagaaaacgtgagaaaagcccaatgtgtgagtaggtaacaactaatcaagtaattaaaccaaggctttgagaaaatatcaccatgccatcgtctggatgacaagaatgtggttgcagataccttaagtcagagtgaaaagtatggaatactggattggcaaggaacaaactcggaaaatatacttctctaaaaatagacgcattgttccttatttgctgggtcctttaggtactacttgatttggaaggaaagaaatagatgtgttgcatattcttacagatatttttttaatgtaaatagatttttcttcatattaggggaatgtatttggatttgaaattcaaatacattttcaaatttgtgcctgaaccatcatccatctggttctcctcctcacacccaccacacacctacctctgtatctctctcttaatgtttttatttcattgcttttctgcccaatggatcagaacctctagaaccatacataaataaaagatctagagcctgccttaaccgtggttttccccacctcctataatgcctttgcagttgttccagaagctgctattagtaaccccctccccacaaaccgttgtaatttctctgctataagaaacttatgagcatccatatctttgctctggatcagaacagatatgttgataaacatttcaataattaaaaaatgtaattttatcagaaataaaaaaaaatcatgcaggtgaaagaaaggcagataaataagacacaagaaatgattgtgtctatcatgaagaagtagtgatctgtgtcaggagaaaaacacaccattcccatactttattttgcccacaaagtgaatttgacacacttaaatgtgtcaaatgtgcatttgactatagtgcaaatgcactataaatgtgcatttgacacacttagtttgactacatataatggattagataaaaagaggtagttttctaagtacaaagtagaaaccatgatttctttaaactgggtataaattggaaaaaaaaatactcaacagagtgttgtggtgtatcattaatattttaggaaatttctaatattaaactatttctagttttaagaagtttagacacagaaaaacaatacatatttatataatatcttttcaaagtatttcatcaatattttaatctcgttaacttttctcccactttcttaagaatcaaaattcctttttaactttaattcgagttcatgggtacatgtgcaggttggttatatacgtaaacttgttatgtatgtaaacttgtgtcacggggggttgttgaacagattatttcaactgttggtactaagcctagtaccaacagttatttttcttgatcctctctccctcctcctaccctccaccttctgataggacccagtgtgtgttgctcccatctatgtgtccatgtgttcttaggatttagctcccacttataaatgagaacatgtggtatttggttttctgttcctgcattagtttgctaatgataatgacctccagctccatctatgtccctgcaaaggacaccatctcattacttttatggctacatggtattccatggtatatatatgtagcacttttttttatttagtctatcattgatgggcatttaggttgattagaatcaaaactcttaactaacattactcatttctctctttgaggttagcatttcaaaaggttttggccaattttcttttcaaaataataatgtttgtctataagttcctcaagccctctaacatctttttaaatctataaatgcctttcagtgtattttcatgccttttctaatgagattcagactttgaaaaaagattcctgttggtatcaaaacaaacctaaataaaagtattctctttcattattttatgatgattctaaaattatatctattttacttaccatcattttgcttgataatgcccagctgatttgattatcatttcttgtcacaggtagaactctgagggcataaccatattttatgctcattcctcattttaagttggttattttcatcaagcactatgagtttaatcactctgaagtaaggtaatagatgagtttactgaaaacacaattcatttcctaattttgctggccaaacgatactactccatgttcataaacatgaaactcttcaagggatctgcttcaaggggaggcaagatgaatgtgctcttgggagtaggacatttagagatacggtaaattaccttgtctaggcactggccaagtggtgctgtggaaaatctccaggacatctcagctgcatgagctaatttgtctcccatggacttgtctctcaatggcttggctgtgggcctactaaaggaaaaaagaaattgtgttttttaccttctctaaaaattgcacattatttgcacttttgaaatctcattttgtttccattcagtggttatcaaaattattaacaaaagccagatgacaatattaatcatattaaagactgtgtttaatttatatttataatgctcatataatgtcataatgttctatgactatactacataggcctcctacagatgatcaaatctttaggtgaaatgtttattttttgtttgtttatgaactgtcaatagccatccatgtgctgttaaagataaaggttttgcagcccggctcagtggctcacgcctataatcccagcactttgggaggctgaggcgggcagatcacgaggtcaagagttcaagaccagcctggccaacatggtgaaaccccatctctactaagaatacaaaaattagctgggcatggtggcaggcgcctgtaatcccagctactcgggaggctgaggcaggagaatctcttgaacctgagaggcggaggttgcagtaagccatgatcgcaccattgcactccagtctaggcaacaagagcaaaactctgtctcagaaaaaaaaaagaaaaagaaaaagataaagttttttataatataggttgttataaagaaaacaaagaagaattatagaaatatctttcttattttgacttcataaaagacagcttactatatgtaactcactagagttgttagacatccctaacaagaaagcttgagtaagtcacttagttattttagagtaggtatgattatttaaataatttaaagtttcctgttgttttaaagaaaagatttgtatcgtatttttttagaaaatgacttttcatgtaagaaggtcaataatatggcacacttaaggtaatattctctatcatttattttttcatttgacttctatgctatttaaaaatacaaaaaataatagttttgtatatgagcatttagaaatgctttgggatgattcaaaatttccaaatctttctacaagtcaggactttcaaaagatatgaagtaagtacagaagtttacatcattcatgcatctgacattgaatcagatactaatcagaaccctggctgagctgtcctatagctaagggttcagctgttatgcattaaatcaattctaaacgcactttttccaacttcttcccatccaaatctatttaatttgtcgtgtgtccttcattatataagagagattttctgaacaaattctctggcttgagagaatctgttcaacatatttacactaacgtgttagtgattggaaaaaaaagccaatgagattcaaccaattaaatgaaagaattgaaacctcagctactgactcaaattatttttgaatcgagggaatttgcaggatgagcttcctgatgtcctagaattgctataagttaattacccacctgtaaataagaatatcttcttcaggtatataataatgaaagtaaaaaaaatagaatttttctttggtgcatatttccctcttactgttccctgggaaaagttactatattccaggaccagattgttttactttgctgtcttttctagctctagagtgatttcaaatattgggtgttccttcaaaggaacagaaatagtaccaattcacaatgccatgcatttgagatataaattaatcagcaggaattcatcacattgtaatctagaaggatagggcaaatcgtagctcataattatctagaattccagaagaaataggacagaaataggaagcaagaagacaaaaagcagtcttggttctcgtatcactaaagagtttcaatggcacgtgatctcaaatgaaacctggtggccattgctcatgtgttgtgttccacagtaactagaggggtgcacatttggtctggagcaatcttcatagaagaggggactaaagccctagaaagcacgagttcaactggctgcagcctgcaaatcaaaagcattcattgagaaaacattaagaacccatgtacacaaacaatagggcttaggtatggttgccactctaataacaactaaaagaagttgtatgcttctcctagatgatacaaattttttaagtaatatattttctcatttcttcttttgctgccagagtgcttggagctaaatctgtaggcataattttagcaaccatttaaaaaattatgacatatatatttttatacaattttttcctgatgtgttgtttgtatttctattttttaacatcctgaattatgtttttcccctatttactgcttgcattctaataaactgcttccattgtttttgtagaactaaaacaaatatactcaatcatataacagtcaacaaagaaataaatacacaataacaaaaggtttgctactcatcccttgcttttctgcttatttacaatgattcagagaatggttagactaaggaaacgtgaccaaaattagcaatatttatttaacaataaaagccaatcctctacactccattagctcatcgtaactatagagaggattatctcaaagtagacaagtctaatgtgcaatttagactgtacataactaaaggcacaggatagaactggcttttattttcttcctggcgcattctctagtcagccttcaatcatgaatacttgtagagagaaaactttacacaagccggaggcaattgctgaaggtggagactcaacctttgacttctgccatacagaagtgaccagcctgagaatatagagatttcttaccaatagaatacaatgtaacaatttttaaatattaataaaatgctggaatttcatttctttctcccaaatgttcctgctttgccttcacggaacttcttgatttcctgtctccccttttccctctcatcttactccaagacttttgtaaataaacagcataatggagaagacactttctcataaggatattttttagttgactatggttgcataacagccaacagaccaaaatatttcatcatcaagaatgtccaagtggctgcccagaaccaggagaactgatatggagtcgcatgagataatgttggctgactaaggatgagaatttgaaaactccctgtaccctcgggctagcttagaaacagcgatgctctgccaagagctggctttagagctgggcatatctacattggaatttcaactctgccacttcctcttcatggaaacttaaacataccctttaatctcttggggtctcaatttcctcatctttaaaattagcataatcccttttggggtattataaattaaatacttccttataagaaacttcaaatatctgagaaatatgatttcaaaatgatatacttgggattatgttctgactcactggaaaaataccttctgtgtacaagcactatacctgctgcctgggataagaaataaaattcatgctctctgtcctcaggtagcaaaagctaacgtagaaatttgacttatatataactacagaactgctcatcaaatgtttgaagcaattttagaagtcagggatagcgtttgatggtattatgatcattttgcagtcaggaggctaggaaagcttaaatcctatgtcactgtcaagaatctctcccaagtggttactaagtaaggcaacgaatgaacaaaacagaacaggaataaaggtcattttgttggttgcaagattctgcaactaattctgctggtgaaaaagtaaattgaagcctctgacttaggctttaagtcagaaagggacctcctaaacacctctctcatgttaagacgtcacattttagatattgagagcagaaggctcaggtatacctgcgtgagagaaaaacatatagctggaggggttttttttttacccattcagacacagcatgaaagacagagaaaggccaccaaaatttaagaggacttcctaacattgcttaccaattctacaacacaatacaaaaaaaaaaaaaatgacaatgagaagttccagacctagactcctcactttgaagatataaccagtgattgtgcatgcaatggcaatgtcctctagtaattgtgtgcaatcaatatctatgaatttgaataagcaggttaatcttttttccttgggttgggaatggagctagcaagaggaagttgctaagaattaggtgagcataggtagaatatgcatagggaaaaatggcaaatggtctttcctccaataggacacaatgttggtgtaattaattatctccccaaattataccttggaatttaaaattcttagcaggaagatatctacagaactcaaaacattttgtgtgaactccagtacatgatgggatttgtccttaaaaggaataactactaaaactagactaaacatttactgtagttcagtgcagactttagtctaggaatagttctaaatggtacccggagtagcgggggaactgatgaaattaatctatactatcacaaaaattaaagtcctcttgatataaatgaaaaatatgtttgtaaaaaattgcaagacacactaagttttagtgttagagattgtgaaaaaagataccagaaaagatcccatcaaacattatgctgaaataaggatataacgtgtatgagtggcattatactatcagaataggaaatggtatcagattcacagattttgggagccaagatggtgagaataaatgtattccaactgcagaggaatatcaataaagtaagtaaataagatttttgtgtgtgtggaaagagggtcagacacctgaaaagaggccataaaatatgaataaacttcaaacaaatgactcacctctacagcaggttgagccaactttcctcatcaaggagacctcaaagttgcttcagagcatccatgcaagttgccttgtaaggtcttgttgatgtgctcccccttccgccatcagatcctcttggccctgcctgatccctggggcctccatggcttgttctgttttccatctgcagggaacccagtaatgacaagtgcttgtcttatagttataaatgccttggctccacttctatcaatttatctactaaacaccaccagctgtgtccctcttgacctgagatgagaactgtctttaagccaggccttgattgtgcctctcttgtggagctggacattctggtccaggagatgctttatgcactgaaccaatggccaatatatgatggtgtgtacccatatgctagactacttgactccaatatccaaagggcagatgtaggattggccccactcatcttttccattgacctgtgtattagtcagtgttctctagagggacagaactaatagaataaataaacatatataatataacattatatatatatgggactttattaaatattaacttacatgttcacaaggtcccacaatagactgtctgtaagctgaagagcaaggagagccagtctgagtcccaaaactgaagaacttggagtcgagtgttcaaggtcaggaagcatccagcacaggagaaagatgtgggatgggaggctaggccagtctctccttttcacattgttctgcctgctttatatttgctgtcagctgattaaattgcccaccagattaagggtggatctgccttccccagcccactgactcaaatgttattctcttttggcaacaccctcacagacacacccaacatcaataatttgtatccttcaatccaatcaagtttacattcagtattaaccatcgcaacttcacctcttctcaacttgaacccatacacatctcctgagatcataatctccaaataaagataataataaggtcgtaattctgcctgatataatacaactatccttcatacaactggaaatgcaccaatccccaacccaaatactaatacaaaaagttaacaatatttaaatgctgatatgaagtcaataaaccttatgtcacatgataaaataaaataaaataaaaatattttcttagtacaagtgtatacatagacaaacatgtttttaacaaaagaagaatgaaattctcatgaaaattatagtccttgtttccacagctggtaacatggttggagctcgtattgatgactaccttcttctactatccattctgtattccctttgccgtcagaaagcacttcagcaggtcatggtttttttcctggaggagtgacccaaaccttcactcctgaggggtctgggccatttgtagtcctgcctggaatggactgttgtagtttcccactgactttaatcacagggcatggtaatactaagagacaccctaatggatctcttgcattctatgcaaactcttcctgacttccattatgcagtagtagactgatttatcttaatagtccgggtcaatcaacccagccaacgctgtaactcccttcttagcctgttgactcaaaggtagcaagagcccaaagtgtccaggtggcaatcttaacttccaaattaatggaattgttgttgtgtctcctggtggcagcgttcctccctccggaactaagacctctaggccagcagaacgtaatgtcacaggaacaggaagcaaaaattttgctagtgaatcactaggggtgatggtgagtggtgccgcttccacgtccccccccgattgctggacccatgaaacctggatatataggagaaacaccaccatatattggacactgattcagagcaaactcagtcttcaggagaactttgcccagccctgcaaagtattgtcactagttggaattgtaattgtgatttcaaaaggccattccaccattctctcaatgctgcttcaggatgatggggaacaaggtaagaccagtgaattccatgagcatgggcccactgccatacttctttagccataaagtgagtgtcttagtcagaggcaatgctgtgtggaataccatgatggtggataaggcattccatgagtccacagatggtagccttggcagaagcattgcatacaggataggcaaagccatatccagagtaagtgtctattctagtgaggacaaacctctgccctttccatgatggaagaggtccaacataatcaacctgtcaccaagtagctggctgatcaccccaaggaatggtgtcatatcgagggctcagtgttggtctctgctgctggcaaattgggcactcagcagtgaccacagccaggtcagccttggtgagtggaagtccatgttgctgagcccatgcataacaaccatccttgccaccatggccactttgtttatgggcccattgggcaatgacaggggtggctggggaaagaggctgggtggtgtccacagaacaggtcatcctatccaattgattattaaaatcctcctctactgaggtcacccgttggtgagcactcacatgggatacaaatatcttcatggtttttgaccactcagagaggtccatcctcattcctcttccccaaatttctttgtcaccaattttccaatcatgcttcttccaagtccctgactatccagccaaaccattggctacaaccaattaatcagtatataatcacacatctggtcatttctccttccatgcaaagtgcacacccaggtgcactgctcgaagttctgcccaccgggaaaattttccttcactgttgtcctttagggatgtcctagaaaggggctgtagtgctgcagctgtccactttcaggtggtgcctgcatgtcatgcagaaccatctgtgaacctggccatagtcttctcttcctctgtcaaatgatcatagggaactccttctgaggccattgttgcaggctggggaagagaaggcagggtggcaggagtggagaccatgcaaggggagccagtacaagttccaaaactgaagagcttggagtccaatgttcaagggcaagaagcatcgagtacaggagaaagccgtaggctgggaggctaggccagtctccccttttcacgtttttctgcctgctttaccattggcagctgattagattgtgcccactagattaagggtggatctgccttccccagcccactgactcaaatgctaatctcttttggcaacaccttcacagacacactcaggatcaatactttgtatctttcaatacaatcaagttgaccctcagtattaaccatcacaacctgtttgcaagttctgtatttttccatttctgcaaatttaggctctgcttgaccacaggccccaattcccagtgtttaagcagagaaatgctaggtgacacagagaggtctattgagttacctgttcataacaactgtaccttctctcgtgagattattatgaggattgagtgcaataatacctgtaaaggccaaagaaaaggacttaacccagagcaactattcagtgggtgctagctgctattcttagaatactgaaaatgttgacttcatgcttaaatgacatcaatttggctcatgtgatgttcttagctcattcagaacgttgtaaacaattacccattttcttttggttctgcatatagctagaatttttttttatttcattcttgaagtcggtcttgcttttttgcctgggttcctgaagattttttttttaatcctggaatgttgataacttgccaagatatgtccaatacaagtcaggttttatgcatactttctggaagatagtgtttctctttgacctaaaaaaaaattagtccttccttcatgtaagggaaactttcatctgttatatctttcagtcctaattttctattttttcttgggtattatatctcagggacagcgattaccattaactaggattttctttttcaaaaatatatacttactacctttatttcctttaaactctgttttttctttacctttgagcattgtaagttttttatatttcccctatttttgtaacttaatattttctcttgacttcattccccccccacacacacacacaatgcaaatttaaatggctttttcttatagttaatatgtgcaactttgatagcatcacagctttaaatttttactttagagctgcttctttttctatcttttcttttaccaaactaccaattgctatatcacctcctctactcaaaacacactaacacacacaaacaattgattattgctgaaaactagactatattctatttgttaggacttagcttaatgtcagttagaacaaatatttaaatgagacaatagaaaacagttcgttaattttataattaattttaaaagagatacattatttgattaatgcatacatgaataactaactttatttaataatttgtctggagtaactcaacataagtgctccaatgtaccccaaatttgctattttgttttgcttcgtaaatcagaataaaagctgtcaatagtaaaggtaagtcacacaaaaatattaattgatccaacacttataaagtcaacacttcatgtatttctaatgaatcacattagttttaaaatctatttaaaaatatatttaaatttgtattgttggtaccacataaagtaacaaataaaattcaaattttgctgtccttccaaatctaaataatagtatatataatgtaaaggcaaatacttgagttaccattaaataattgttaatacataaatttctccttctatctattaatcccagaaacatagaacatttaaattacagaagaatgtaaaagaaacaacagaggtcattttggatgtactttcttctccatttatcaggaaatgaattattataagtattataaacaagcaactctgattaccaagtaaatatgatcatgtatgaagtcacactttatcttatctatggaaaatttctctcactcagtaagtagtaggaagggatacatatttcactaatcaaatttgaagaaagattctgaaacctgatgattgttatttttattaggatctatctaaattcagacattcgtggccaacactactagtgtcctgacagatgtctattcttctttcttttaatcagagaattctacttttctgggagttagaaatacgcccagtttaaaatacttagctttgcaaaattcaatgccactggagtaatcatataccgtgcttcttgccaacaggatttaagaagtctttgagcgtgacttcccttcaagttggtgagaaagtttgcctcagttgacagttacacacttagcctttaagcttttgtccttctctctccccttggaacacagacatgacgggctgaagcagagaagcctgaggttgaaggccatgtgctaaggatggccgattgagaaactgaataaaacaggggtatttcacatctatcatttgccgtgttagccttgaacactccacttccaggcttttgttatatctaaaataaaccactttccagttcagcctctgcttaccaagtttccattaccacacattcaatgcagtcatgacagaaaaattttatactggtttgtttaattttttttcatttatgatttatcagtagcattcatatgaactttgaaacaaaatcttattattcttttctctaattccatctttcaacatttaaattttgcagatatggcattgtaataatcccaatgaaattaattcaagctgaaacaaattaagttattttaaaacttcaatttgaaaaaagattgtacgctattaaatatgaaatgatgactataaattatacaaagaacttttgcttttctaattctatgtataaacactggcataagtacctaacgatgtttccttttgggaagtatcaggggtggaaagggatggcataaaacttattcattcacccagtgatccctgaatgatgactacaacaatgaaagaggctgagtgatgagcaaaaatttcagggaagcaccgcagagataggaagagtattattttttaatcttaaaactctctctttatatgggctgatctttgtgacttaaatattaaaactatgacttgttctgggctaaaagacagcttgaaaaatgctagcaactcagcagtaataatgacttgaatgtccatattacagagcagaaactgaaaatacttccctaccctgttcaatctcacccatgaaatttccctcaatattttcaacaattaataataaggatcaatatatgtaaacctgtgcttgcccttaatggggaagacactcttcctattgtcagatgatagcaaaagcccatgccaaacagtgtaaggacttgtaggatcacagatcctccagattaacaagaactgttgagctcaggggcaacccatgcaaagagagggcctgatgcttccccaggctaacagagacaaatgtcagggtgtcggcagagtgaattgctcctttgcaacataatgaatataggctttgttacataaaaatcaaatcatgcaaatgcagtgctttcatcaaaacggagaaggaagaaattaacttaaaaacctgttacatattgtcttgccttattccatataatcagcattcatttcttattctgaatttcagtaaagtaaatttggttattttgtggagcatgttcattcatatccaaaaaaaaaccttctgttgttttcttcaagttttataaacagacccttttcagatatcagactatttgatatcttgactcttaaactcttgactaacttaaagttaagattctgacatcctcagtgggataaaaactgtaagtggaggtacttgtagtgatttctatcaactaatcttatttgtctaattgtgccactttttactaagctctttcaatccaagtactttattctcatgacctgaataagagctctgtgaaataaatactatcaatattttattttacaatgaagaccctgaggcacagaaccccaataacataacgcacatagcactttccatttcaggaattagaggaagacctaatgtctatattgccagaagtttttatcaaattgagatgggaggagaatttcgacaccacttttgataagacaaccacactttctgaatcattgaactataaccagatttcctgcttgccttagccagtatcaaggatttacccatgaaagcagttttagaagccatatcttttgaacgttcacagatttatcgccgtctgtttcacctgagtagcacctctgaatgactttataaatgacattgatagatgacatgccatagggcggatggattgtcaagtacctttattgcaagagcattctactcaactttctaaggcagtgacacatattaatatatctggaaatgtgccagacaaagattgaatgaaaagggaatttctatttctctcttggttaaccattaagttcaattaatgaaaataccatacctcatgcattccagttaatcaaattgtacctgtattcaagcatttaatagcaattatagcagtcaacacctaaaacatttaggtgaacaagaatctcaaacctacagaaaacttgcaagtatggtagaaatcacttttttctgaattatttaaaaatagttgccaacctgatgtttcattacactcagatatttgtgaaaatttgtgtgtgtgttctacagaaaaagggattttacaaacaaataaaaaagaaataaaggaagagaggaaatgagagaaagaagaaaggaaagaaagaacaagaaagaaggaaggaaggaaggaaagaaagaaaaagaaagaaagagaaaaaaggaaggaaggagaaagaaagaagaaagaaagaaagagaaagaaagaaagaaagaaagaaagagaaagaaagaaagaaagaaagaaagaaaaaagaaaggaagggggaaggaaggaagaggaaaggaaaggaagaaagaaaagggaaagggaggaagggagaaagagggagggagaatacatactcataatataaccatcaatatcaggacactaatgttgataccttactacagtctcattctcagaccctgttcaacttttaccaattatccccataatatccagtgtaccgaaaagtccaaatcagaatggcatgttatgttttgctgccatatttcctttagtccccttcactctgacacagctgctcagttttgctgactttcatgaccttgaacttttgaatattacaagcattagcttttgtagaatttatctcaatgtgggtttacctgctgttttcttgatattagattcaggttagcatctttggtaggcataagacagaagtgatgaggtgtcctttcattctatcacattgtgcccaagtttgatttgtcttctcaccaacttcctattacctttatcacttgactaaagtgatatctgccaggcctctccattgtattctctatccctttgcaattagtattttgtgggaagtaaacaccctgttcctcagcaaaaatttcaacttattcatttacttattgtattagttcatttacatgctgctgataaagacatacctgagactgggcaatttacaaaagaaggaggttgattgtactcaccattccacatggctgaggggggctcacaattatggcagaaggcaaagaggagcaagtcacatcttacgtggatggcagcaggcaaagagagctggagcatagaaactcctgtttttaaaaaacatcagatctcatgagacccatgattcaatcatctcccaactgggtccttcccacaacacgtggaaattacgggcgctacaagatgaaatttgggtggggacacagagtcaaaccatatcatttatttatacctatactggttcatagtttccaatttttattaggtgggttataattatttaacaaaatttttattttaatcttcaaatgaaccttttttgggccagtagcagttctttcaaggtgctttctttttcttttgccatgtttccaacattcctggctcaacaagatataccaggttcatctaatatttgccctgctccaacactggaatcagtcatttctcaagagcccctggagaagccaagatctgggtgtacagtgtgtgcttattgcttttgaagtattgctactccagtccttccaagtggaaggaagcctcgtgaatatatgtatacacacacaaacacatacacacatgcacatacagacacacacacatatacagacacagagttttacatctatatgtatttctagatctagctataaatcctgaaaaccgtgagttcataccaataactaattccaatctaacctcacagggcctattctggttttctttatttctttccataaatgcaaactccttctccaacaatgagaaacccagatctcattgtgcttacatatttacctatttgataagatgccctgtatataaccaaactcctgcctctgccatgacccctgatccatccaggtttactgcttacccaaccctggaagcctgggctgcctgccacatgaagtcccttatccccttgtagaacacttgccaggtaacatacaggatgctcagttaaatttgaatttcagagcaacaacgaattattttgtagtatcagtgtgtcccaagaaaagttatactgcttatatgtataactattatttctttaaaagcatcagtatagtttcattgtttatctgaagtttaaatttaactgggggtctcgtgttctgacaccacagttcaggcttctcttagcataggtccgactttgtattcacttgctgctcgcttcatatacatgtcccttcccttcaccttagcactctggctcccccagctaagctgaccctctgtgagacacaatttctcattctactgtgtgctgtgacaccctgcactgagttgggctgtgacgtccagccagcctgaaattcgccaggcccttcctcagctccgccacctggtccagggcaacccacccgttacgggctgtcctctcactctgaaacctcaccttgagccactacacctctccccaactcccttgtggatgtctatgtcctgcttcacccagtatttttaggacccaatgttcagagagggaaagagagggaggaaggaaaaagaaagaattctgaaacatatttgaggatagattgcagagtttaacactaagtgctcatttcatgataatagatcatcatgaaaaacacaggaaagttctactaacagcaagaataatttataatttctatttgcttccaaaaacagaaataaaaggtcagaagtaaaccgttttggactgtttttccccaagtgtgaatagtaataagcctgctttgttaggagaaagaaaaaaatcaagacggaggggagaagaggaagagaaagaaaagaataaaagagaaagagaaaaggaaagagaaaaaaagggagggagggaaggaaggaaggaaggaagaaggaaggggagaggaaaagaggggaatctattatgtataatgttaaacatttaaatggtatgaaatgctttaaaacactaaaattttacattttattacttgaataagaaatctacacaatctggtagatgaggcagggaatgttgcctcccctatgtatatatttttttctttttcttttgttacaaatctttattttatttgtgctagcaaagtgcccagacctaagtgatagtagacaatttatgtaatctagtgagtcacaaatgagacaattctatacccctagggagtggtttgaatactgtggatgtatttttggtttcaaaattattgggaagaggaactagcttggtgaacatgacatgagacaatctaacatactgaagaattattcattcaaaacatcaaaagtgcttccatggagaaacactggtataagcctaaagctgcactccacccctagttttccatcctttctagcagcttacacatggcgagagtacccagttctaatcaatgaaacctcaaaggaaatgtgaagttgctctaggaaagctatttgtttctaatgaaagatgacatcatagaactcaccatcactttccacttctttcttcttcgaaagcagccatctgtgtccaagagaactatagaggcactagatgttgcactgttaagagctgagccaaagctgcacctcccttcctccagctacggaaggaaaataaatccttacttgtttaagccacagaggtcagtttttctgttattttcaacatagcacattcctaactaaaactatggtatttttatttcaagaagagaacatttaaatgttcggctttcagggatctcctgattagaagagatgactacgaactcccctttcaacctatcttgatgatctatattagatgaggtgacagagggagggaggagaactagaaacagggatatctcctagtttggtataaatgcaaagaagacttcattaaaggcttattgaatggtgaatgccttgaatgctgcctcttagtgcccagtagcccgagggctatgaagcatgtgaaagtgacatagagaatttattctctaggggctaaaggacctatctgttaataacactttctaactgcttgacattcagctaaatacttaacctaagattcctcagttacatgaaggtaataatggttgctacctcaaatggctcttgtgaggattaaatgaggtaatgcttgtatacagtgcaaagtatagagtaagtatcaatgaaggtaaaatactggtgatttttcatactctctacataattttaaattgtgtttctttggttaattacttttggctgttactttttttgttggtagtgaatttaagaaccatgagaagaatgttatccagcaaatgctgtatactttaacatgcttataaagactttttaaaagtagcttcatgtatcccttcttcatttttatagtggcaatttaagctaactagctggcattttatcatgcatttacagatccacaactctagtaaataaagttatcagacaggaatacaattcagaaatatatttaaagagcaaagcttatttttctaagaattttactttgttgatttaaaaaaacaatattttattgtcttatctaagtgaatttcatatccatgacaagtttgttaatgttatttaatcccctcagcatatcaatttaaagatcaaaggttaaaattttataaaacaaattgtgaggtaatgcaatgtcaatcttgtaatgttttatgagaataatgcaattaaattataatatataaaattcttacatttctaatcaaagcttcataaaatgaacatattgtatagagtgattacaaactgaaaaaacaattttcttaaatagaagatgtgacagaacatagttaagaggatttactaggtaatacattttgaggacttcttaaaacaataaactacacatctttaatatttttaaaactgccagaagtctgtatttaatataggatcatgctgtatttttgaacctctgttttgttgtaatgatatcatactgaaatgtaatgcaaagtaaaatgtatacaatgtaaaacgcaagtcttacatatgttgctattggatacactgcttataaagctaaggataaaagataactctaaactctgagtcatacaacagttataaagcaaatatgcacatttatatctcaaaagataaaattgcaactgttactaagcaggagtaaattctttgctgaatcatccttattgcaaacatgttttgtcattagtggctagattgcccaattcaattttcctacgtatcaatcagtgcctaacgttttaattttactaacccctttggaactattatcacatcctaatattaatgccaattgtagtaattgtgcgctaaattccctttgcctctaaaacatatcttttccataaatgtatgtgaacatttctgaagactcatttttactaacatgtattttattatataaacagaaatatgtatgacaaatatataaaataacagacattaatcatacattaagatactattataaaacggaaatatttggaaattcaccttagaagttttaaaaggagttgacaaagagtttaagtttgtttttctaccagtctgtaatatttatgaagtcagacagatctgtgttctcctgtatgtagccctaaacaccaagcccaatgcttggaatttaatagaggaccaatgagaatttgttgaattgaaaccaattgatccttattatgctttctagaaacagggaaaagaaaaaatttgaaagacttggtaatttctctttcacaaaatgatcattcaagtagatattaatagaaacagctttcacgattccctaatcttttttgccctggcaggatgttgtctatttcctttctttccaaactccatgccatttcatagctcatctccagaagtttctttatgctagggtgattcatggcccaagagtctgttatgattttccttacctagggcattacattagaaaaaatgaagcttaaaatcacattaattatatgatattaaatagacatagctacatttaaacaatgatgtatacattatgattaaactatttgacttatttacttgtgttgccagggtttggaagagaatatgcaacaattagaattatgtaatgttgatggcattatgataatttttatccctactgctgcacaaacttataattaaagttaaaacaatttctctatgcctggtaactacttcatattattaatttatatggagtttgaaatcgatcaaaagccatctacctgtcttttgcaaataaactgtccttagtccacctctttacacatcctggatttatatagctaatgtcttcaaaatagtataggatttcacatttgaagtttaattttcatatagtcaattttatttcagcctatggatatccttttaaatattcttacaaattagctatcccttctagctttgggcaatatgaaaatactacatgtaatttatttaaataaaataacacacatgcacacaaataagttagatgaggccacatgcatttcatctgtcttagccagtttggactgctataccaaaataccatagactgagtggcttaaattatagacttattctcacacttctgaagatccaggtgctgccgcatttggtttctggtgagtactgtcttcttggtttgcagacagccagcttctggctatatcctcatgtagtagacaaacagaatatctttctcctctctcttcttatgaaggcactaatgccatttatgagggctgtaccctcataacttaatcactcccaaaagactcacttcaaaatattatcacattatggattagggtttcagcatatgaatttagggggaacataaacatttagtccatagtaccatctgaggatgcttttcaagttgataatgttcaaattttcatctctctgtccttgcaaacattatttaatcagtctatatattatcagcttatccaccaatgatttatgagattgtatttctgattaacttatcagaaaccaagatactctatcatggttattgttttaccagttaagtaagacttacagacataacaactatgagatagtccaggtctatttaatagaaaagagctgcacacatattctgaagtagtttgctaacctgaatttgcataagaatccactaaataagctttagagagctgatgagaatccactaaattagtttgagtggattcttacgtaatttctaaatgcaggtctcaggacaccatccccaaaatatgttgattcagtaaacctgtggggttaataatgaatctacatttacaatagggactccacttccctaggttttttgtacatgattgatccttgaaccatacttttgaaaaacactggaagttatatattatggaaggaaaacaatatgtactaatttcaacccagagaactatgatgtggacacatctgaagtgcaatatcaataatatttaatatgtatcctacacagtgaaatagaaaagaacaaataatccaacagggaatatatacttttatattatgtggtaagacaacacataaaaataaaataaataagatgtgacagtagaaataaagtttttttcacataaaccttggttcaagaatataagaaaataactaagtattaatatgtaaaaattgcaaatgttacaatactgcaagcaagatttctaaccatcttctgggtatgtgacttttacttttctgcatatgtggatatgtcaacaactggaatggtaatgtgcttttcttagaattataaacaagttatgtaacagtttggtggtccaaagacatcctctaacatgtgtgggtctctaaagatacgatttggctgtcaagccttttctatttataggaaaataatacataacgtataaatttctaaacagtattaattctttttgctgacatttacctatttgtttttattcagttttatctttgcaatttcttacaaaataaaatatttttcatttttatgttgccatgtgactacatctgaatatcaaatttttccaaaatagtaatctgattgtgtaacatcgtggcttaaagcccttcagattcttcacatgactcttaagatgatatccaaattctggacatgacccacaagaccactgccagccaagccctccagtcggccctctctgggttcttcataccagctctctccagcttagccacaactcatcaagatcttggtatataacagatactgtccctaatgcattatggaacaaatcaccttcaatccctgctaaagatgttccagatagaatgaattttcttttcttttcacaaattgatcatttgaaaagaaaaggaagctttgccatgtttgtcatgtcacacaataccacatcagttacgaaatgatgaggctcagatttgaactcagacaagtctaaatccaaaaccctaattctcaccattgcattacggggcttgctctttgaattttcaaatatgccttctttctctattcttcaaagtgtctggaaaactatccttgttcccagagcctccttcactggctaattctacccccagttcctctcaggcagtctagactctgtgtgtacgttcccatgttacaaagcacaattcctaatggactgtattgtaattgtacagttagttgtttgtatccctcaaaagaattttgtatgaaggcagaaagcttattattcaccagaatctccagactgtctgacacttggcatataataaatgacaaataaatgtgttgattggttcgttgaaatcatgaatgaatgaggcttttgtatgagaaagtgtcagaaataacgtttgtagatttgcttgaaaatgttgcgcaacttaaaaattgtgttgggatctggcaagatggccgagtaagaatagctcctgtctgcagttcccagtgagatcaacacagaagatgggtgatttctgcatttccaactgaggtatccggttcatcttattgggaatggttagacagtgggtgcagcccacagaaggcgagcagaagcagggtgtggtgtcgcttcacctagtaagtgcaagggactggggaactccctcccctagccaagggaatctgtgagggactgtgctatctggcccagatatcacacttttcccacagtttttgcaacccacagaccaggagattccctcgtgtgcctcatcaccacgtccctaggtttcaagtgcaaaactgggctgctgtttgggcagacatggagctagttgcaagagttgtttttttttttttttcataccccagtggtgtatggaactccagtgagacagagccattcactcccttggaaagggagctgaagtcaggtagccaagtggtctcactcagcaggtcccactcccacagagcccagcaaggtaagatccactagcttgaaactctcgctgccagcacagcagtctgaagtcaacctgggacaattgagcttagcaaggggaggggtgtccaccactactgaggcttgagtaggtggttttcccctcacggtgtaaacaaagccactgggaagtttgaaatgggtggagcccaccacagcttggcaaagctgctgtaggcagactgcctttctagatttcccctccctgggcagggcacctctgaaagaaagggagcagccccagtcaggggcatatagataagactcccatctccctaggacagagcacctgggggaaggggtggctgtgcgcgcagcttcagcagacttaaacgttcctgcctgtcagctctgaagagaacagcagatctcctagcacagcgcttgagctctgctaagggacagactgcctcctcaagtgggtccctgatcgccatgcctcctgactagaagacacctcccaacaggggtagacagacacctcatacaggagacctcctgctgtcatcaggtgggagcccctctgggatgaagcttccagaggaaggagcaggcagcaatctttgctgttctgcagcctccgctggtgatacccaaacaaacaaggtctggagtggacctccagcaaactccagcagacctgcagaagagagtcctgactgttagaaagacaactaacaaacagaaacaataacatcaatatcaagaaaagggacacccacccaaaaaccccatccaatggtcaatagcatcaaaaatcaaaggtatataaatccacattacagcacattacagctgtggtggccatggggcaaaactccttctgcctgcaaaaagcagagggaaaagtaaagggaactttgtcttgcaccttaggtgccagggtggtcacaggggtgtagggcaccaagcagccacttgggttccctgattccaggacttgattcttggatgacacttatggacctgccctaggccagaagggagtccactgccatctagggtgagtcccaggcctcgcagcattcaccacaagctgatttttaaaaccttgatccttaagggaacataggtggtagtctgtcagtactctctgtggcctggggtggtggggtctatggggtgaggttcctctgtctttgaaaaggggaaggaagagtgggaagggctgtgtcttgtggtgtgagtgccagctcagccacaaggtaaacttctaaggttttttactctagtccctgacttctagactggacttctagacccacccagagcctgggagaccttgccgccctgaagggaagaacataaaatagcataaaatctgaatactgtatttgtttccagaaatgtacttctattattcctagatgtgtgtcagccaagaacttatctcagaaactgcttatccttgcaataacaaaggggaagtttcctctttaaaaaggaacattgggctaagatgatatactctgaagacgtaaaaatggcctggtgtctattacaaataaatgaaacaccagagtattgaatgtaatatcttctggtgtttaggtcttaatttctaatatgaggtgcttttaaaattttcaagctatgtttgatgcagaaaattaaacttgacacattaaagaataccaactcacttcggacctcttaagaaacatgtattcttctgtaagaagcaacatgtgaatcaagtttaaaagattatgaacattttggacacttgccactatgtttgaacaactttgaaagtcaaaaatgaccatactcaactaactacagtagtatgcacgtaggaattagattgttttagtcattaattaaccaataagtaaaataatatattatttacttttaccttttataacattgtcagtcacctttttcaaatatcaagtactttatatttcaaagtatgtcttactttctaaatttattttcctatatatttagcaatgcttaaggttgtttgcgtaattaagaaccacattacatctctgtgtgtgagagagacagtgatatagctcaaattattcaaaggtcaaacttggacagaaccaatattaatgactttatctatcttatttattttttaccaagtattgaattttctgttttatgttagccctcactctgtggtgagacattgtagcacagtcattaaaaacatcaacgctggtactaaacaacctgggttggaactgctgctctatagctcattaattgtgcaatttgagaagttgacataatctttctgtgcctcaaatactcaatagtaaagtgtagataacaatgatgcctattgtcatatggttgttgtgaagattaaacaaattagtataagtaaaattgactcaaaaaaatctagtaagtagtagatttttaagtaagtagtacatacatataaaacatagtaagttttatatgttgttagttattatttttcctatttgtacatttaaagtcatatttagacatattaactattatttataaaatttaatatttcaatatcaaaaattttaagatacgaaaaaaatttctctgtctagattatagatatagataatcaggatggtttcatgcaagaaatagcattcttccaatgttggattgattgctatagaaaatgggccaggcatagtggctcatgcctgtaatctcagcactttgggaggctgagatgggtagatggcttaatcccaggaattcgagaccagcctgatcaatacagggaagccccgtctctataaaaattagctgggcgtggtggtgtgcgcctttagtcccaggtaaccaggaaggaggaggtaatctggtaggaggaccactaccagatcactacctccctagcccaagaggttgaggctgcagtgagctatgatcacaccactgtactccagcctgggcaatagaatgaaaccctgtctcaaaaaagaaaagaaaaaaaaaaagaaagaataaaaaatggctttgtccagtctcttaattatagtatgtgaaatatgtaaaatgtatgaacacaacatacatgattatccaatcactctttaacagcggtactacttttcagttatcataaattccacacttatgtaatatttgtggttgttttaaaagttgacccttaaaaataaatgcccaaatgatcgctgacggagccagactccagcacatacccaattaagtgaagtgtttccctaggtgctggggtaggagcaaacatatttctctagcccctgagagagacaaaggtttatagagtaggtccagatgctgaacataaatgaacgctcaatgcaccatggcatgattaggacaattcatagaccaaaccagcagccaggagtggggcaaaagctcaagtttgcacagataacaaataattgacaaaaatctcattaaacattattgcttgaaagacaaaaaaaaaacaacccatattgtattacataacttatccaaaggcctgccagacatccttcaaagtccttgcttcattcttggaactgtgacactgagaggactgaggctgaatattccagaagtcactgaagcacatccagatgctcttcattgccaccagccgtccaactcagccagaaggcagcaacatgggagtcagagagagtagctctccttatactgttctcttgctttaatgtagagcacgtacaaagaggttatatcacacacacacacacacacacacacacacacccatctctactagtctgtctgttgaaagcatttataaagctgatattgaattcacaaattccacactggcagcaaatgggcagaactgtgagtcaatactctagtggtcccagaagaaatactgaaatgtcatttcttaggtctcttttcttcaccaatcatggctattatattaaattcctattagtagcattgaaactactcatactccattatattacagcactgttaaagatactgaaatatattgaagttttaccttgacattgctgtagtgtccagatgttaaaagaattttaaatagaaatgtgttaatttgctgttatatgtaactctcctacatgtacttctaaaaatcacttttgtgtcagctaatgtgtatggttatttaatgttggttatttgaggtttcattaaactgataatatgtcataatatttttaattagaaaagtagatctaaagcttgaaattttaatcagaaaaagaatacaattcacagattttatttaatatttaatataatttgggaggttataattttgcatattagtggaatatacaagtattcttagacaacactttatggatagagaattaatcctctaccaacattatgttgctcatatattagatgaggatgttctaaatggttatatagtgacttttcccagggtacaacttatgatcaaatatttttggacaaaactcttatttttacttttttaaaaagaataaatacttcaacttcttccagaaaaaaaaaatccagatcaagtggcatgcatggtacaaagtgaaaaggaatggctgaagagagcctcctaaaaagaagctaacgtcacattggctctgtctttaaaatcactaaaggaaacaaacagcagactttacaaggaaaaggaaaacataaactgcttacatagaatatctacatttggaaggtgctgaatggacaactggcttagaaaaacattatatttcatgagtattacccctgatgttcataatttcatagttaagctgttccctcttttgattttatgcagacatttcaaagtgaagtgcattaactatgtatgcaaatatgtgaattcttgtctgtgtatgtgtgagagagagaggcagagtgtgtgtatgtatgtgtgtgtaaatatgtacacaaatgctgtatattaaaatgttttgaactctgttaattcaggcactagaatgtcaggcagaagaaaagaaaactcaatccacaactgttactctagggtcatgtttacagtttttccttatagattaaaacatgctctgtgtctgtacaaaatatattttcacatgtaagacattacaacaggaaaaaaggagcagttatgtaggcatattttgccaacagtggtgttagaaaaaaataaaaactaaataatatggcagttgctaaaaacatttctgcaaccttgccaaataaagtttaggaatatgtcatgtctgcacttgaactgtttgttctcaagctctcttggagaatgtaagcatggccaaatgtcacagcctcaggccctggggactctgctcacactcttgtaatgaaaacatgaaaaaactatgaacagtcttcacatgtccctccaaaaatgacacgttttagttttgtcttcagtgatccaaagtatttgacatagaagatagatagtagttcgtggaagttttgaaacaatataatggaattcttcgaaacttcataaagtgctttgagtaaattgttgtgttcatctttgccatatattgcgattttataaatagaagccaggaagcatcactcaacttagtaatgcattaatcaaagctgacattcaaaataggtaagtcatattgagtaggttcaatatgccagagataaatgtaaattctaagaacttcaagtacctttttaatattaactgcttagttatttttcacatagtcaataacattctagtcacaaaagcattttggctttgctttttaaaatcttacatgaaataaaaatttaaaatcatggtaaaaaatgaattacattaaacattcctaatatataaatgccctcataatttcatagcaatacttacattcttagagactttgacaaagaaatctagaaacagattcaaactctcataccatcttccagattttctctgcctcaaatcttttaggtattctacatgttattttagattgatgctattattaacaaataataacccagtctaatattaggtaatttcatatttgctatatatttgaaatatttgtaatcaatttgaaaaacaatgcaataacttttatcagcgattaatataacagacaaatttatgtttttaagaatataatatgattgagcttttagcaaatcaaatgactcacctaataatttttaggggccttacaacacaaattattttcaacaacaggtccctgagtataaagataataaccactgcaagatctagaatgttattttcattataacatgtaatgagagggaagatatatacctggcttttctgattgtcatagatactgattttaagaacattcagatcccagtcatttgtacataatagtgaaggaaagaacaaggacaatttatatgagcctcctgcctcctccctcctccacagcctgttctccttacttttttctttctctcattatctatgttggtcatactgaactgctggcctaaatatttcatatctcccttgactccagttgcttttatcttggcttgtaatttttttctccctttattgtttatataatacattttttccccaatagtcaaatattatatacaacttgtcctgaactcaccacatgacctttctcccttcccatcccagcacgttgagctaacttttccctctttggtcatacaacaacttgagcaaaggaataaacacttcgtttcatgtatgttggtttgcatgtctgtttacctaccagactgttggctccttgaggacaagggcatttcattcctgtataccaggagcattgggcagtatatggcacatgataggtactcagttgactgaatggaagttctttcaataattgaaggaaatttcttggactactgtcttggataacaacaatttgacagaactacttttagggcaacgaccatattgctctcatgttactatcatgttttcttagaagttcaggagagttgatctattattatttttttccattaacatttgcttcttaactggaacccatattgtctttttttctcattgttaaaaaaaaagtcaaaagaattttgtcttactgctaacctatctgctctttcccctaacaaaatggcattttctaatcaaccttaatccaatatatttcttcctcctcttcttcctccttgtttttctttctctttccaaccagtaaagtttccttgtgtgctagaatacgttccattttcccttacacacgcactctctactttgctctgctctgtccccaaaagggtctccattatgaagtttgtccatcaccaactcaaataacatccccaaaaaggagacttattctaaagtgaaggaaacaacaatgggttcatagccataaatattactggtcttaccacatgctccaaaacccaaaaggtgctggcttgatataacaatgttatggccaactaagaactaaattaactcatgaaatggagagcagtctggttgaaattttgtcctacaggatgttatatgacttaaactagctcttattatatggagccatcactcccattaccagaatttataggaaaagccaccaaaatatgagtctgagggccattctactatcaccaaaataactcactaaaaaaaaatatttacttccagtccccaaaacctttggttaaatgggtttggagtcatagtccttaagaaagaaatacttccaccagagaacacagtcatagtctgtttattttcaagctgagacttcgtcttggctagtcagggctccccatatgattgaacccacaaaaagagaaggaggttactcattgactgaagtgactgattccaattcccaagatgaacctgggtttctgctacacaattgggacaaaaaggcctatgcatggagcccaggggatgtactggggtacttctcagtaccttcttgcctaagggtcttggtcagctatagaaatacagtaaagatagggaccaccatggacccagatcattcaggatcactccagcaagtaaagagttccattcatctgagctgctggcagaagtaaaataacacagactgagtagtggagaaaggaagctataattatcaaatttaggcctcataactagcatcagaaataggaccacagtgggaaaatgttattgtaattatttttcactttcccttttcctcactttccgaccttatctgagaacactggtgctgccttctgttttaagcttcagatgaacagatcattgcattgctagcaacacagctgctgggaatgtatgtttggcacataacactccatctggacaaaatacaagagtacagaaggtgagttctgcttgatacttcccatttgaccctcctgatctgctctccatcttcctctaccctgccctgtgttcctacaggataaccagtgtaaaagacatcagtgagctctcttgccctttgactcccagtggggttcagttaatgggagtcatcagaaggtcagaggaagggaaaagagtgggatgaatatttatttccccttttccttcctgtgggttgatttcatgcacctaccaaaggccacagctcctacaagacaaacttttcatccattatctgttggtttctaataaccattcttttttcttatcactttaatgccttttaaggccttggggtataatacttccccatttttaccaggcccaatgggattactctatcttacattgatttccctgtacttggtccaaacgtttggaagtaatcactatttattaaactttcttcagttaccatctctttctgccaaaaaaaaacctgtctgatacacagacgtcaacatctgcaaattgtgtccataactaaatgataattatcaaatattacttttccttttataatatatcatacaaaacaatcatttttcaatatactattaaaatgagtacaaaggcatattaccaaaaaaagtaaatagatccatgaaagtgctaaaagttgaaaagagtttctgccatgagaaggtaagaaatgttgactttagaaaatattaagggtgtagggttgtacggaaggataacctagatcaaaggaaccacatcttaatatatgcatggatgagggttgcaggtgattgaaacttttctcagtgataaaaataaaataaaataaaataatggctttaaatgtggagtttttagttacagagatcaggaaagagcttgagatgaccgtgatagaacttaagtaaagattcatttacaaagcttctaagtcattcagcctctaccccctcctcagcatgtgcagggcagctgagcatagatgcttctccagctgaagagctcacctttaatctgagcagaagatttttctgaatgtcttacagtggcagctgtagtcagtgagaggagtagaaaacagaagaggatggctctgaatctcctcaatggagctagttattgaggacagaaaaggaaaagcagctctacctgaaacaaaattaatcaaagtacaccacccctgaactaagtcctccaccctatggtatttctagcctgcaagttctatagcctcataatctaaaggtaaacttgcctgacaactggaatggctcacaatcaggcctctgatcacccaggagggagcctttagggcaacagacctacaaaactgcaaagcaaaccctgctagcaaagggatcaatcagcatagaagctaattcacagatatgagtgatacattagcttcaacagttataaaatgtcaacagagataatgaaaaaattggaataatgtgtttaatccatggtagtaaactcagatttagcacatattgcatctctaacataaaaacaggctgacatataaaagaacaataaaagaacataaaataattattggaaatgaaaagtatgagtgctaacattaattttaaaagaatcaaaaggaatacttaataaagtgggtagtccttgattaataatttggatgataaagacaaggaaatattccagaatagaaaatttaaaacactaagatattgaaaatgttaggaaattaaatgccattgataagaaagtataacatatacctactggagaaccagaagaaagaaaagagacaaatggtgagtataaataattacagaaataatagaaaacaagtctataagaagaatatttaaattgaaggacaccatggattatcggaaaaatgaaagccagagagataattctgaagtttcagaattcaaaacaccaaaagaaaataataaaatacgttgcaagagaaaaaaaacacagagaaaagagaatcagattggcatcagacttttcattagtaccactgcatgtcaggaagaacaaaaaacagatttaatctagaattctagattaaatttttaaagatttaaaaagaaaatattttaggctgcaaagctctagtgtccacaagtatcttttgaatatatatatatatacacacacacaaacatacatacacatacatataatctaggtaaacaagaagttggacaatgagagaatgatccaagtgaagagtaatgtgaaaagaaatcacaaggtgatttgaacagtaggtaatatagcaccaaaaattcttcaggaagaaaataggtctcattccctaaattgtttgattaagtcacctcttaatgataatttaaagatacatatatataacttcttaaacaataaaggcaaacaaaagatccaagtaaaaaaaccaattgttcaagaatgacagagtccaaatataaagaaactttacttaaattattctgaaaaatagaggaggaaggaatacttccaaacacattatatgaagccaggattatcctgacaccaataccagaaaagacacatcaaaaaaagaaaattacaggccaatatctctggtgaatattgatgcaaatatcctcaacaaaatactagcaaggcaaattcaacaacacactaaaaaggtcattcatcatgaccaagtgggataaatccctgggatgcacagatggttgaatatacacaaatcaatctgtgtgatacatcatactgacagaatgaaggacaaaagccatatgatcattcaactgatgctgaaaaagtatttgataaaattctacatatttttatgataaaaactctcaaaaaagtgggtatggaagaaatatatctcacataataaatgccatacacaacagactcataactcgtatcatatagaatgagggaaaaactgaaagctttagctaagatctggaacaagacaaggatgcccaatgtcactattgttactcaacatagtactgcaagttctagctagagtactcagacaagagaaagaaacaaagggcatccaaatagaaaaggaacaagtcaaattttccctgtttgcagatgatgcgatcttatatttgaaaaaacctaaacactccaccaaaaacctatcccactgctaggtgtgtacccaaaagaaagaaaatcaatatatccaagagacatatgcactcatgtttattgcaacatcattcacaagagccaagatttggaagcaacctaagtgtccatcaacagatgaatggttaaagaaaatgtggtacatatacacagttgagtactattcagccataaagagaatgagatcccatcatttgcaacaacatggatagaattgaaggtcattatgttaagtgaaataagccaggtacagaaaaacaaacttcacatgttctcacttatttacagaagctaaaattaaaacaattgaactcatggagatagggagtagaaggatggttaccaaaggctgggaaggttagcaggagggtagggagaagcagagatggttaatgtgcacacacacaaaaaataggaaaaatgaataaggcctagtatttgctagcacaacagagtgactatagtaaaaaataatgtaattatacatttataaataactaaaatagcataattggattgtttgaaacacaaaggatgaatgcctgaagtgatagagacctaatttaccctgatgtaattattacgtattacatgactgtaccaaaacttctaacataccccataaatagatatgcctattatgtgcccacaaaaattaaaaattaaaaaagaaatatgaagacactgttttgagcaactgaattaaaaagaaaaaataattcatttgccattgaatgaacttagcacaaattgtgagcccaaaacaatactagaatgttttatatatgttaaataatttaattctcataatagtcttgaagtaaatatttatgatgtgatagtaaatgtacagacaatgaaactgatgctctagacatttaaatttccttcccaaggccttccagataatagtgaagggaatggggtccagtgcccaaagacaaaatgggctcattgtttaatgttaagattcccaacactaattttttttctacattttcaacttttgttttagatacagtggccacatgtgcatatttgttacatgggagcattgtgtaatgctgaagtttggaatatggaatccatcaccatgatagtaagcatagtacctgatagataatttcttaacccacaccccctccctacaccctctagtagtccacagtgtctattggtcccagatttatgtccattctgatactaaatttaaatttaatttgaataaccatttgtcaggatatttaaagcattccttatcaagggaaaagttagattcaaacattaatttttactcatttaattattcaacaagtattaattgtgttgatatcatgggccagacaatatattcataacacaaagaaaaataaaacatctcagccttcaagaagcacataaattagtagattattaatccaagatagatgcatgcttaaaataaagttctttatcattaggctcttatccctgctcattactgccttagagatttttgagcctttgatcatggtatccccacattagccttccagataattccatgagaatacctacagcccaaagatgttttacacaaaggaaaaaatagtttgaatccttcaacatgaatcattatggtttagattattgaagttttcaatgctttataataccacttccagatctttcttattccatataacacttgtgaataggtacactaagaagaggcaacgggctcacaggactgaagaaagtcagaagaacgtgaagatgggaaaagaaagatgttcttgtaagttacatgctcagctatgatctaatagaagaagaagaaattaaaataattgtttgttgtgatatttgaaaactcagccggtaacccaccatggggatttcaccacattgtcttcgggaatacctgaagttcctggttctgtaatacattattgaggcatttaaaaattaagggaaattgcatgactcaatcttttccaataatgttagttggtgtaaaaaataacatagattttattgtggacacaaaaattcccagaagtgacatgcttgcaaatagttacactttcagtcaattgatttctttgaattgtaggatttaaaggactcagtaagcatgaacaggaaaaacaggtaagtcagtaaaatattaaccactgtgttagactgggaatgacaattttcaacaatgttttatgcttcgttagtcagttaaattctctatcaacataggcttagcaaccagttgaaaaccatgatcacattctggaaattcagattatgaatactaaagatacagtctcttttgtcataataggcgacaggtattccttaaaaagagtaaatataacatagaaaaatacaagtccacataaataatagagaatttatggtttaattttctaaagaaaccatttcttaattgagttggttgttatttttgtttttgtttactgtaaagtttattctttcatgatttagttgctttatataaatgactagaaaaaaatggaatgatcagtcttttgagaattagtgtatcatcatgtacatatttgccctctaacttataaagaattttatgtgaaaaggcaagtatttgtgtacctaaagcatgtgataatcttggctcactaagttgccattaaaaagagcaatttaatatttcctaaaccaaatatttcttatgcatcatctcattgaaatctataagctaggtattattattattcttcttttattcttacattggcaaataagaatctgagggttcaaagaccctttaccttgtcaagtccacacaactagcaaaagatgaatcagcactccatctcaggcagtcagaattcagaactgaagctttaaaatatcatgtattattgagatatgttctcaagccacacaaaacagtggtaactgtgatgtaaaaaaccatctgcatagaagtatgttctactaaaaaattcagatgcacacacatgcataaacagagttatatatatccatatatacacatgcatgcatacatacatatacatataggaaaaaaggctaagaccaaaatagtaatcactgttataactagatggtgggattataggtaaccccttctattttgttttctatgcttttctataggttttcaactttctacaaaaaaatacttagttttattaactagctcagattaattgaaatcattatcaattttttcttataatgctaataaactttggatataatctatgacatcaatatatgattataataatacatgaaaaggttttatcttcaatctagtaactctaagtttaataactttgttttgaagttatgggggttattaagaaatattctggtctgaaaacattgccgccacctataacttgagtactcattctagggaataaatattattcaactacaacttttgctaatattttattcgatttcaaacaggcattcttgaattgtattctgttttcttgagatttagataagataaaatatttcaccaccacttcacaggataaacacaataaatatcagctaagtatagcccatatacatctgaaaaggaatatcaaaagtatccagtatttatttttgaaaaattacatttttatttttcccttcacattttttcagttgaataggaactctcttaatggaattctgtttaaccatttgctcactcctctctattcccccatcacacttcctgtgctggtttgcttgcagactgctcccctcctcattttagtggtagctcccaagtcaattgtttttcctacatttgtcattctcttcaaagctgttatcataatcatatacattaatttacatatgaacagattaaatataattgtgaaaatttgtcatttcaatggaaaaaagattaaataatttgggaaaacaaatataaaacaaaataaaaatgaatttctaaaagaattgattttaattttagatgtggaaagaagacaagtgcaaaagttagagaaaaaattaaaacctagaaaaaaatctgtgcttaaatttctgggcaatatacctaaattcttattctacttttaaaaaatgtcaatcaatgtcttctatagacataacattactataatgaagataacatattttaaatatactttaaatatgtgacctaaaataaccagtattgtattcaaatacttggtattctatatgtggaatcagctcccttaaacttattttttttatacttggtattctatatgtgtgtaatcagctcccttaaacctatttttttctggaagcatgcttattttaaagcactaatttttgtttatatcacaaaaataaatgtatcatatgacatgtatgtaattacagtaaaatggatatgaaattaatatgatgtgatgaaattcaactcaattaaaataacaaatttaaatataccaaacatgactgaattatttatacaatgctaattacatctgttttacaaatttgattttacattttacttccaaatccatcataagttttacaacttaataaacactaaaaagaattcctacacaggtaattttgagaaatcacaaaatatcatgaaagaagtcttgtaaatttatacatcaatgagcatttcaaaatgtattaaatttaaatgaacacttgcccatttggatttaaaagagatatccaatccacatgagttcaacatatcagtgacagttttaaggaaaattaactcgaattcagtatgattttcaacaatttaagaacagttaaaactttcaaaaaacatgtaaatacatccattatcaaactaattgacttgccaccattcacggcattttaacaactaaactgttcgataaagattgccatgcactatgattggttgtcacatcaaattctaaacactcgattcagaaagaatctctgggttttgtttttgagaatatctttgaaacgaaacagtcaccacacatattagtgattctcagaaagttatttgtactatgcgattcaattttatacttctttaagtggtatttcccaaagtgaaagtcactctgcagtacatgttgtctagatcaacattgagaaaaaatgaatatacctcttttttttcatatccccaatccactctccctgaaaataaacttaagagtaagcagatatattcagtgctatgggggaaaatattgtaggtaggttagttacacgtaagaactactgctacaaatagtgagatggacataaatgcctttcctgttttatttcagatggatattggaagattagaatgagaaaaaaatagataaaagactgttgaaaaaaatacgtagtctacgtatagttaagaaagaagagatcaaaacaaaagagcatgtctcaacagatgctggaagaaagtgctaaacaggaaagagctgtggcccatatggtaggctacattcgcactgtaaaacgaaaagttcttcacatggagtatgtgtgctttgagatgccaaagagtgcattaagatatcttggctctaattggggcctctgtaaatgtcagtacatttatcatgttgtttaggcaccacactatttaaaaccacagcaaaggattatctccttttgggttggtgtttggggtcaaaagctcctcaaaattgtttcaagattcaggttactctttattttactcagtcttaatcagcatatgagactctctggtctctttcacaaaagaataatttaaagtacttaattaatgatttattaaatgtaaagtcactaagtttattgatgatcctatcattaaagaataatgtgggtaaaagggcaatgcatataatgaaattaggcttcaagaaagaataaaaaatgaactaccttttaaagaaaatccaatagtttatgagaagcatgacaaaataaataagtaaaggtacggtgataagaaccaaatggaaaagagaagtccatgtgcatttgccaattttataggaaagtcgccaactgtaaatgcaacaagggatctgaatgaaaggcttccacactacttattccagttgcagtacgttatggctgtggttattagacaactcttcatgttggtacaattgaagtttccattgggcatttaagtcattgctgaagtcataaaaattaaaaacaatcaaaatgagttatcattatatatcaatgacaattcctatttaatgaatgaaatgtaattttcgtctgctttctaggttccaggctggtctacaaggccaactataaggaaggtgtgtgatttcatctgaatacaaaaattaaagtaataacatgaggaaaatctctcttggctatccgtgattacattttctcttctaaaaataaagccgatgttaactgacttgtcaattatcctgaacatttctgagtaaaatttcaagcaaattaaaatgtttctcaaagtttattctacattcagtaaagcagataccacaagttactaaagtaattaagaaaattgtaatttatttgtgtggcaagaccttacacatacaaccatctgatcaaaatcatctaagatatatgataaaaaatgaaattccgatagtgaaaataaccatggtgaaatatggaagtattatcacgtcatccattttcatgcagatgggaagctaaatcatagggtaacgagcaaatcaaaatcagaaataaataaagaggaaagaaggcaaagtgtttagttacgaagagatatgtgtgaacatcgccacattgtcagtttatggtgacgtgaacacatctcaattctaaatttgtatttttttttctttttttcataagaaactccacagactgcttttagaagatttggcaaaagtagacactcaataaatatttgttgaatgaaatgaatttttactagcaaacaatatatactcattggggaatgttgcatgcagactttcactgtagcaaatgatacatactgagctaagtaagccttttctggaaaacttagctttgtctcaattaatttgccatagtactggcccaatcatacatcaaagcctctcacatgtggcattttgcttcctcttccagagggtcattctgatcaatattgctgaaaatagcttatttcgttgtgtatttcagttctagagttgtcagataaaatacaaaaaaaaactagttaaatttgtatatgagttaaacaacaatactttttcagtatgtctcatgcaatactcaggataccagtcagtagttggaactttttactgaaaaattattcattattaatcttaaatcccaatttaactaggtgtcctgtgtttttatttgttaagtctggtaaccttattcaagtcagtatgcaggctgtgcctataaacttcactgaaactgacagcatcatgaaacatttactggctctgtcttctggggaagaaagtctagtcagtggagtattgtgactggttccactcttctcacgcactgtaaacatgtttaaaatgcattcctttttttaaataatattaatgtaaagctaaagatgtttagaaaaaaacaacgggtttcatagtgtctgtcttttgctgtcaaatcatctcagtgtgtggcaaatggatgacctttcaaatgtcttagagagacataaaccatgtttttcatctcaagatcagactgagaaaaagggggaaaatgtgttaactccatgtgtgaaaaagaagagagatgggagtggaacttaattacataaacttgtcatagaattaattcatcatactcagtacatagagatatttttcacaatttcagaacattctggagtgtaactaattgaaacatgactcattgatgagcagtaattccagtcattccggccactgcatgagatattgttgaaagcaagtgtacagccagaaaatgattattcatatactatcaatggagttgtagctcacttagcaattaagagtcatttttacttcccaatctataagcgtttctaacgcatctttgaaggttttctgtaaaacttcccatagaaatatatgaggaggaggtatttttctgtttcgaattttatttttgtagcatacactgttctcaatccattgcctccacattaaaaacacaattcaaatgcttgaaacaatactctgcacttattatgcatacatttttaccatatagtggctccttattatgattttgactttgcctataatggactgaacttattttcccagaggagaagatagcaaggaaaagaaattttttttaaattaaaaactccaaattatccccctcgtcttgcatgtttgttccatccttattatggatatgggacagaattatcactttctggaatgttttcacttagtggagtattgtgctgtggacaccctgacatatttcagggcgtgttttgagcctcttttgcctcctcctttcagcacgctatgcagatgtgccgctgatggcatttcgtgactaactttcaagtctacatttggtcttacactgtgaaaaaaaatacattgttttattagctttgatttttaaatagcaataatgaagttataatttcacctatgcatttaaggtatatttcatccagagcatataatcacttagtagtgttaaccaaaatgaatgttaaagtgctttagaaatctatgcaattcaaataaatgctaaatctaccttcaatggggctaaactcacaggcccataacaactacttatatagcacttacgttgtattagttattacaagtaatctagggatgattgaaagcatatgagaaaatatacataggttatatgtaaatactatgcctttttaaattatttatttgtttgtttgtttgtttgtttattttttgagacagagtcttgctctattgcccaggctggagtgcagtggcatggtcttagttcaccccaacatctgcctcctgggttcaagtgattctcccgcctcaccctcctgagtagttgggattataggtgtgcgccaccacacccatactatgccattttatataaaggacttgagcattcacagattttggtatctgtgggggtcctggatcaatcccccatgaatgccaaagaacaactatatatactatgttcgagggccatttgtagatattcaagatgcataagcaaataaagacaggaatttctattttcataaagcttcaggtctaaaagccacatatgtgaaatcaaaccaaaggaacacagttaacttccccactagaaagtcaacctttggaagatgatttttttcctctacctccaagaatagggtataaaacaaaggaaggactctatgtacacttgttgaattaatctgcatatcaagacagaatgtaatgcaaatacaaatctctattctgtctgggtcttatacatcatacctataaaaagttgatcactaaaatgccttctgccaaacactctgaaatactattgtcatatttctgattaccactctgaaatactattgtcatatttctgattaccccttattcttgaatatatataaacacacacacacacacacacacaaaagtagtttcattctgcaagaatattagacaacacaaaatgtatgtgtcaaggtgagacaaatagaggcaaggtatcagggctgcttaacacctaacatgacacttagattgtttctttaatgtaagatataagcagacctttcacataatgtggtaacagcagaattagcttagtagtaatcaccattcctggaaagataactcagaacaaataactgaaaaattcatcatcttttatgagagaggacatcattttagagctaggataaatatggatattgactagagaaaagataaaacaagtgtggtaactttgtgcagaacctattcatatcaggaagagagtggatatttttgtgagcctaaacatatttttggacccaaaagcagaattcatctaaacaaaaaccattgtcatggctggttccatataacaagtgtaatatgtcctggaaagtagcctatggtaagagtggttgcctgatccagttactgtgaacattattcggtgaaaagttctgcctaacaaatgcattcaccagtcctgctatggaggaacaggtctctaaaacaaagacattgtttcatattatcattcttggattggtgtatctgaatataatataagctattcttaaacaggcttttaaaaaatattgagttgagatttggggagttgaggtttgaagagaatgaaggtctaaggcactcataacagtggaaataacttcctttagggactaaaagtctaatgtttgtaacaaaaaagatatttggtggtaaaactagaataataaagatataatataatataatataatataatataatataatataatataatataatataaaactgaaactgcacattttagcaatcctaaacaaatttttaaaaccatatgggtctatatgaaatgtttaatgtaggtccttactaaaattatatttatatgtgaggaagtaattttgatgctttcatcaaattcgaagctgcccgtatacacagagctcttattagcaatgcaaagagtatgaagacatgtaaagaaacatgcactttcagtaatacaggatggaaaccgagaagcactgttaataatgagtatgagggaggaagttgatccaaatttcagaggctttggaactgcataggaatgagttttcaggttattagtttcattgctcactaactagacagccttgagagcttaataattaaccagagtctatttatagtatttttaaaacatggtcattcctaggagttctgggctgtttatcatactgctctgagttgacaaggtcatgcagaattttcgtgtgaagagagactgtaacctcaaggtccaaattccctaggctgtgttggaggtacactggtatgagaaagtgataacagagcaggctgggctttttatcttccccagatcctctggaacatctctttgaaggcctttttacctaggtgcaattttgtcccccttccattaaagattactcaattatctcaatagcttctactagggataagtgaatttacctcagccttctaaaaggaaaccagactcctacaagttgctaaaatacacttgctaacccatgaccaggtcacaaataaacttgcttataaaatttatgtggattcttcgcttcacgtgtcgctcctctactccactttgagccttcttctactaacgtgttttctttttttaataatgaacatctgtgacagcatctttgccaaaataaataaaattaagaagatgattctgtgggttatgctaaacaattttttaaacaggttcagatttcttctgaacggagtacgaaataaatgtctccatatgctggttcctgtttattattgtgtgtgagagagagaaaggcaaagctaagagagagagttagaaagacagaccataattatagagtcattaaaagttacttaacacagttttataagtgacttcttaattaagaaatgttttcaatacaaagcagtcctgctttctcattcaataagttttgatgtatattttccaaaatgtttttatttctgtcattaagaggaaagccagtccattttggtgttggacttgctggaagtgttgtggccatcaatgttatcagttttgctcctggctaaagtaaaatcctgttcttcctctgctgtgcttcttttctggctttacatgcacaaaacagactgtacaaacacgtcaggaaaggacaacaaaaggctaactctttccattgcatcacagatttgagacaatgaagacaaatgttgattaatccacgatgcttcagaactattttgtctgataataatatttacaccagccttcttcgcttcctttttttcaagatgtatcttttctttctttctttaccttcaaactatctacttcctttggttttagatttgtttgtcattagcaggacaaagttacagttttattctatttgctagcctaatctgcaaatctttgtctctaacaggagcatttattaaattttcctttaatgttaatactcctttatctaggcctgagtccctgctcctaattggtgacttctctatctttggctggtcctgtttatctttctctccttttttcctttcccttggttaatttttattttattttttatcctcttctactggatctctttcctgcttctgatttctatattactgttgtaaattttaattcaatcttttttaactatatgacattttattattgttttataaatgaatatctgttttgattagtgattcttacatttagataaggaattctcaaaactgaccccaaggaatatttggcaaaacacagtgacattactgactgccacaattgggagctaagggtaaaaggtgatactggaatctagcgggagaggaaaagaatactgctaaatgacttgcaataaacaggacagctcctgtattagtctgttttcacactgctaaaaagaactgctggagactgcgtaatttataaagaaaagaggtttaactgactcacagttccttatgcatggggatgcctcaggaaactaacaatcatgatggaagaggaagcaggcatatcttacacagcagcaggagagaaagagagtgagcaggagaaattaccatttataaaatcatcagccctcatgagaactcactatcacaagaacagcatgggggaaactgtcatcaagatccattcacctcccacgaggtatcttgttagatacatggggattacagttcgagatgagatttgggtggggacacagagccgaactatatcacctccctacagcagagagttcctggctcaaaatgtcaatcacactgatcttgagaaactctggtttcagtttagccatatttgccactttctttgcatttcatttttcttgcttcccatactttacgtctgagctcactgtccctctacatgaatcaagggtatattctcaacaaactcagtttttgttgttgttctctctctctctctttccttcagcttcttttaactttatctttatccttgaaatttattttgcaaagtatgaaattatagaacggaagttttctttgggttacacatcaactgtggacaaataagctggcaacttagtactcactcatttgaaagaaaccttcccttttatctctgactgttatgcagctcttccttcaggtatttgatgtactgatgtgcactatggtgtatcacagtgtagatttcttattatttttcctgctcggagttcactgggctttttgaatctgcgaacaagtatatttaatcacttctggaaaattcttaactattacttcttcttcacattttgccactgtttctcccctctctactcttcttaaagaccaattaaacatgttggagcatattcagaacctccatgtctcataaccactttttcatgttttccatcttttttggccccttgtgcaccattctggatatagatcctagattactaattatctctttaattgtagtattctgatgttcaaccaaaccattgagatttttctgttagttatttgattttttatttccagaaactcaatttttttttttgagatggagtcttgctctgtcacccaggctgggctagagtgcagtggcacaatctcagctcactgcaacctccacctgccaggttcaagcaattctcctgcctcagcctcccaagtagctgggactacaggtacatgccaccatgcccagctaattttttgtatttttagtagagatggggtttcaccatgctggccaggctggtctcaaactcctgacctcgtgattcatctgcctcagcctcccaaagtgctgggattatagtggtgaaccactgtgcccagcccccaatttgattttttccccaaatctgctatgcttcatttcatatttcccatttcttccagattttaaagctagtgttttatttctttaaaagagtaagaatagtgaatttttattatctgtaatcactacatttaaaatacatgcagatctatttcttctgtttctttttttttcctgctgtttcttgctcatgatattttgttttattgtgtactcagttgtcttagaaggatatgcccattttacaaaaagaatatttacaggactctttaaggactagatgaggttgccctcctcaagatgatttggctttgcttctaggtacactaagagtctgagaattcttcaattcaagttcatagtttgaggacactgaaaacactaatctcaggatgtgaatgcaaaacttcagggactgttttctacctttctttgtctcctaagctcatatatgccctaagcgtgtaactctttaatgacccagcttaatgatgggagggtctttactacatttcccaccttgatgggttcaagaccttgattcttcaaggccacaaatatgaagcccaaatctacttagatcgttcaatgcctttgggacaaaagtgggtttatttctacgtgcctgctcacatatctggacacctgcttcccctacaattttgtcccagttgctcctcattggctaatctaatcttcaatacttttagagacatttaaaaaaaatacatgttctgtactattaatggcttttacaaaaggatgtgctcaataactagccaatattaaagtaacttgttaaaacatggtgtcttatatgtaatgctcagtgaatatctacagcttgtcggtgattaaaatttctaatattcttgacataaagtcattgtatgatgcactaggatgttaggagtctaatggataacatttattatgacttagagttattatgaaggttaaataaaaattaaacaaattgctatccacatgaatatattatgcttatgttggcaaagctaaaaatttggtatctcacctaatgaaaatattaacaatttcagttagcttttgatgtaataataacagatatcatagagttgaggtttgtcatactccaggtacctgtattatctcatttaatcatcaaatctatctctaagaaatagatcattttacagaagaaaaacaatggaacacaaggaagttaaagtacctaaagtcacacagctggtaagtgacgaagacagaattaggcctcaagactataactcttgaacccatgatcttaactatatgaaattactttatttccacatgttggcttctatagaatcaattttatttataggaagctggtaaacaattaagtcaatgacaaaaacttttaacattcctaaaatccctaataaatataaatccatattttcactttgtcctggaggacttacttgcaaaagaaatggatcattcttttaaaaatttaagtttcattcctaagagaccttatttaattttatatctctgatcaccaaaatatactaagatcattaaagttgaataaaattaaatcatcatttcaatagtctattgataatctagatttctgttttatgattgatcagcagagtttttttaagattatgatttataggagaacattcaaaccttcaaaggaatctttgtaaaggaactaatcaagcagaattaaacctcaccacataaagagaaaactttctgagtcattagttcaataaaatgacagttacataagagaagcctgagtgaattgttattaattgtagccaagaaacaaaaagttacacatcatggaaaagaagagtgagctgcaatgatggtttcatttttatttataaacatagcaatccctaaagggctcaagttgattagaaatcgtgtgcatgtgtaataaaaagtgaatttttccccaagaatttggcatctaacaaaaattttcagtgctttaaagaataagaaaagggtaaaggaaatacaaagttcaataaaattttccaaaccttttctcaaatcctcaaataccagggtacttgaattagttcctgtcagttggctgatgagtgaattgggattgttttgaaatcaattgttgtcaacagactcattaatttcccaagaattggtcaacgatttactttttttttgaaacgcattaataaagttgactaaaagaaattggatttgagtcatgttgatttaaataacagctatttttttctatgaaactttttagtagtaagtaatctagaagcataggcagtcactcttttctcagttgaaataaacctaaatatatattataaactttttcctatagcaatatcataatatctgatgaatatatttgatttgcctttagtcattaaactttttcttttgactccatcaacttccagatggtgtatttatttaaaaatcaaaataagcactgaagtatgactaggaacacaaaatccagtttttttcattttagaaaacataatgccccaaattactgctttttcagagaaataagaatccactaagccgatacatttactttgaaaaaccaacaacctcagtcaataatttaaataatttcaggccgggctcggtggctcacacctgtaatcccagcattttgggaggagcaggcgatcggatcacgaggtcgggagatcgagaccatcctggctaacaaggtgaaaaaaaaaatagccaggcgcattggcgggcgcctgtagtcccagctactcgggaggctgagcttgcagtgagccgagatcgcgccactgcactccagcctgggcgacagagcaagactctgtctcaaaaaaaattaataaataaaaataaatttaaaaaaataataataatttcaataatttcaaaagatgatttaattatatcaacagctttgggaatgttaagaacatctacatttgttgctgttatttattattatttggttttgttgtgttaaagcaaactaatatgccctgagaaagagtctgtatttctatatttgagtccttgtggacaaactgtaacctagcttaacaggcagaaaagattgaaaacctaacttaggagtatgcgcctataacaatagctgagtcttagcccatcccagcagccatacttcaaccactcatagactgctgagtgttcaaactgtgttcgaataaggcaaacgccaacctgtaaccaatcccgctgtttctgtaccttactgccaatttctgtccatcacctcccttttcttgtctacaaatttgctccgatcacgagcatccctggagtctctctgaatctgctgtgattcggggggttgcgccattcgcaaatcattcattgctcaattcaactcctttaaatttaattcagctgaagtttttcttttaacagttgtttgatgttttttaaataaagaggtgaccagatgatcaggttcatttccagtggatatttccttttctgtgtgtggcaattggaagatggataactagtgagttcctgtgagaactgtcaaaatggcattgctgtagttttatgaaagcaaaaaggtgacatttaagatcacattaaattcaagaagaattgtctatgagtccaatttttgatttcttgcaagtaactaaataaggtatattttttatttttggttttagtcatgtctctggtagaagacattcgtggtatagccacaaatctccaattcaacacccatcattgctgaagctttccaagacagatgtagaagaacattcagacaaattcacgtggctcataccaatatggtttggtcctaaaaccccatgaaacaggtgagttgtgccaccaatgacttccaagactcttgttttgctcctctagatttattgttatcctataaacatctttggtgttttgtccttatagccacaacctcatatttacatacatataatatatggagactccaaaatatgaactctaggaaaatcacccatagaaacatggaaagaaattcttcacttcagctacagcagctgatctaagctatccgtcactaactttttgtttgtttgtttgagagagtctcgctctgttgcccaggctggagtgctggagtgcagtggcgcgatctcggctcactgcaacctccacctcctggatttgtcattctcctgcctcagcctcccgagtagctggaattacaggcatgtgtcaccatgcccggctaatttttttgtatttttagtagagatgggctttctccatgttggtcaggctggtctcgaactcccgacctcaggtgatctgcccaccttggcctcccaaagtgctgggattaccagggtgagccaccacacccggcctgaagactgatttattttaagaaattggctcatgtgattgtaggggccagcaagcctgtcatctgtagagcaggtcagaaagctaaaacttcaggtaagagttgatgtggcaaccttgggtgtaaattccaaagggcagcaggctagaacacaaggagaatttgtattatttcattctgaaggagaattcctcattcaggaatcctgtttttgctcttggggccttcaaataattataggagacccacccacattacgtaggggaatccactttactcaaagtctactgatttaaatgtcaatcatatctaaaaaatatccacagcaataactagatggtgcttaaccaaacactgggcaacataacctggccaggttgacacttaaaattaaccatgacaatatgtttttgaaaaagtgtcataaacactcaataaatgctttctaataaatatttaaaatatataattctaacattactctttaatatatttagcaaataaaatccagatacaatgcactagcttttttcctatacaaataaaatttaaaaaaaaactttggttacaactatttaaaaacagtttatgtaactaagccattaaaaaaatagttttacagccagccatggtggcaggtgcctttaatcccagctacctgtgaggctgtggcaggagaatcgcttcaactaggagggagaggttgcagtgagcagagattaggccactgcactccagcctggacaacaaagcaagaccctatgtcagaaaaaaaaaaaagataaaaaaaacaagaaacagacatagttataggttaatacttgaagtgtttgttattcagcaataaaactttcccttgagacttggaagaaacttaggcaggtccttttcagttaaaaaaaaaaaaaaaagcaaacaaaaactgctttgggaggcttagatgggaggatcacttagggccaggagttcagaaccaatctgggcaacatagaaagaccacatctctacaaaaaaacaaaaacaaaaacgaactttttttttcattagccggatctggcagtgcatatctgtagtcttagacagcaagattgcttgagctcagttgttccaggtcacagtgagctatagtagtgccactgcactccagccttggtgccagagcaaggccctgtctctaaaatataataataaaataaatatatataaataaaaattatataataaaaacaaatattgcatgtaagtcagggaagggaaaaataaaaaatagaaacctacctcacaatcacacatctttaacatggtatcaggcttttagaaatagaaaaaaaaagttttatgccaattttaaatatgtgatttataattttcaaaagatacattgattcttagtcctgcagcaacactactgatgagtttacaactgactagagatagtcttgctataattataggtagagcacatatttttgtagacattaagaggtttaggagataaagaaattattatatggacattataacttttactagtatagctattttgaattgaaaaatgctgatgactttcaaaaaatcaactgttgtttaaattaggtgaatccacattaaagaggcttaaggttatttaacacacaaaacaaatcaaaatagtctatctgaacaacaaatttcatggatccaaaaaagcagatatttaatccctcaacattcttgttctttgcccagctaaaattccacaatatttactgtctgatacgagggaactaagtcatttttctatgctatatgaataatagtttatttttacaaatagaatgatgtgaaaaatgtatccatcaaggtacaaaacctatttgcaaaaatcacctagtaatcaatgacatgagtcctttgtgtaagatatatccaggttcaaattcacagttttgccacttattagctgtgttatcctagacaaccttaactttctcattccttaggttaattgttggcaatagtgatatttattctatatttgatacttactccagtttaaattggatgttaaaaaaatactcaaagattagaaaatataataaagtaacatgccctggactgttctttagcaagtactgctgctttaaaataaaatgtaccaattttaaatgcatagttcaaagtcttaactaatgtatacagtcatgcagcctacactgtaacatgatacagcatatccctatcactccaaaaagttcttacatggccctttgcaatccctcccctctctcatactttggtccctgaaaagcactgccctatattttaaaatcctggtttttccctttctagaattacaaagaaatgaaattattcagtatgtagtcttttacgctgcctcctttaacttagtataattctttataaactcatttatgttgttgcatgtattaatatttgatttcttcatgaggcatatatgcaaacattgtactgggccaattgtatattcctgtatttttttgtttgtttgttttggttttggggtctattctgttttgtttttgagacagagtcttgctctgtccccaagttggagtgcagtggcgcaatctcggctgattgcaacctctgcctcccgggttcaagcaattttcctgcctcagcctccaagtaggtgaaactacaggcccacctcattgtgctaatttttgtgggggttttttgtttgtttgtttttgtttttgttttattctttttttttttttttttagtagagatggggtttcaccatgtttgctagtctggtcctgaactcttgatcctaggtaattcacctgcctcgccctcccaaagtgctgggattacaggcgtgggctgctgcacccagccagatattactgtatttttaaagacatccatatatatgaatagacaaagatttctaaatatgacatacatacattttttagaagattgataaattggccctcattacaattatcagtaactgatcttaattaggattaaattctgttcactgaaaatcaccatttaaaaagtgaaaagaaaaatgacagactaggagaaagtatttgcaatgtataaattcaacaaagaaatagtatctagaatacatagagggctcttgtaagtaaataagaaaaagacaaaaaaaatccagttaagagatggaaaatttgaacaagcactgcacaaaatgagatatcataaaaccagaaagcaggcaaaaggtaatcaacataattagtcatcagaaaaatgcaaaatacacccacagcgacatactaagatacatccacaaaaaagactaaaataaaactcgcaatatcaagtgtcaacaacgatatgaaacaactagaattcttacagtgctcatgagaggataaactgatacaatcactttgaaaaaaaattttggtattattttctatgtcctggctatttcacttttgagtatgtccctaaacaaaatgagtacttaacattcaacaaaatatatgcacaagaatgctcataatagagtttattcattgtgtacaaaactggaaacatcccaaatatccatgaataatatgataagtaaatatattgtggcacacgttggtagtatagaatgaaatttaaagcagaaaacgggaaagaatgaactattgctgcatacagctggatggattaattcttttttttttttttttttcagatggagtctcgctctgtcaccaggctggagtgcagtggcgcggtctcggctcactgcaacctctgcctcccaggttcaagtgattctcctgcctcagcctcccaagtagttgagactacaggcctgccaccacgcccagttaatttttgtatttttagtagagacagggtttcactatgttggccaggaagtagctactctggagaggagtactgagtaggaaggaacacatgggagccctctaagatatttaaaatattctatgccttgctctgagtggtgattacatgggtgcatacacatttaaaaataatcaggaagtttattaaatatttgggcatgtaaatgcatgtaagatacctcaattagcaaacaactcttggaagatactgcagatcatctgggagtgtcatccgggaaggcattttgagacagaatgtaatcattttgatcagatataagttcagctccacagtttgaattcactagtatcttcagttaaaggccacaggtggtaatgatgtctcctgttgctatatttagcgatatagtagttttaagatagctcaactttaaatatgaagttgcgataagattcagtttactcactcttcataagaaatgtactgaagaaagttcatatttacaatatattattgttaaaaataaaattataaacgcactttttaatgaattaatagctctataaatacccactgacttggtaacatatgtaaacatatataaagcttaatgtaactattaaacaatggatttcaggtttattttagaatttgatatgataaaagcactgcaaaaagggcagttaaaatgtagcctacatattctcactccggatactataagaaatgaaaaataccttgtaaattacaaggtaacccttgatatatttgtttagtatgcatttatttataataattgtataaacacctattttttaattaaaacgcttattgaagacactatgaaccatggcatgcaaaaggcatcaggatacaacgagacagagattaaactctcaagcgttcatagtgagagggcagacagacaaatatcattataattcaatgttgaaattgggtcagagctatgtgctcatggagagttctatgccaaagtctataaaacacagttccagtccaaagaacttaaaaatgtaacgacaaagtgaaatccatatgaactttaaaaacaaaattccacattaatttctataaaacttgtaattcatggtaactaaagtttaaatgtcctatattttaaatttggtataatcaattcattgcagtctctgtattgttatctcagtgtgtatgtgtgtgtgtatattaaatgcaaaacaatccaaatgaaaggcacgagaaagataatatttttgtcatatattttctactctcaaacttcccaaataaatgcctgttaatgatttcaggtttaaagggcctcttttccaaatgccagtgagcatgacaagtggcccacacttcaagactttatagccctctgatatacttgctctcagacacaaaccagatacttcaccatctgcttttcttcttgctgatcactcatgttttaggttagataacatccacagaaaaccataaacacatcatatattacatgataattatccttccttaaagataacagaaaaggaaacccattttctgatgtcacttactccaaaaagctttaaatccaaaagatgagcaatatctgttccactgagaaataaattagaacataaatgttgaacactcaagaaaccagagataaattcacatacaataactctcctgaaattgtctttgtttgtagcacaatattaaatgagcccaaagtgaaggaagataaataacatttttaatttgttagactatcccacagatgcactggagaatgccggaatatatagcacattagaagtgctttgtctgcatcatgatattgattcctctgatcataacgggatattttagctcaaaatgtgatttttatggtgagaatacggagaaaacacttattgatgagcccactatttgccaaaaatagtatattaagaaggaagatgttatattagtccgttttcagcctgcttatataaagacatacccaaaactgggtaatatataaagaaattaggtttaatgaactcacagtttcacgtggctgtggaggcctcacaatcatggcagaaggcaaaaggcacgtcttacatggcagcaggcaagagagagaatgagaaccaagtgaaaggggtttccccttatacaaccatcagatctcgtgagacttactcactaccacaagaacagtatgggggaaattgccctcatgattcaattatctcccactagtttcctcctacaacacgtgggaattatgggagctgcaattcaaatgagatttgggtcggcacacagccaaaccatatcagataccctgaactatataagtctaaaagcgaaaaattcaggttttgcagtctgtccattcagtgaccatttttagataactagagtgatttgctgcctttatgctacttcccccactcattctctaatttcaaaggtgtcttagactttatcatgaatcacactataaattgttttataaaactatattgttcttcactttttaaagatgtcttcaacctttactcccccatagtcatacagatatggtaacaagatcctacaacaaaaattaccagatgtcaagctctgcatttgactctgcgcattttgagatcatcaagtatgtcttattcagcttcagtttcccagcctgacagagaaccgaggactcaaaaatctattggttgaatgaaggaaaccaaagttaggagtgcattagtcccctggaagaaactcattcataattgtatggtacagtgtgctcccacatgaaaaggattaagaaaaacaatgcctacatattcgcctcatttctctccagttacagttttacagctttaactttccctttacatcaaatttctggaaagctttgtctaatttctgtatgaattatgatgtcttggatttcaccctagctggctattttttctgtctcttttaaaagcatctactcttcctgtcactaaactcatggccccaatctaagccctctttcctttccactctacactttcaaaagagttaatttcacccatgtccaaatcttcaataataacgttcacagataacttatgtgtgaaataatttatctatacaacaattacttaatatctcacaaacacataaacaaacttgatcttgttattttatcttccaatgttccaatgctagctaattcatcatcacccatccaataatgaaaaacagagaattaagagttaccctgttcaatacaagaaagagctactacatagtgtgggggttctgagaaggtagcaggggttaggacctcaagcacagggtacaagtggcctcaaacacaaggtatatgggaaatctttttattatagtaacagagtcaggtttgatatcagaaaaatgagaaattctctactgaatggcttttgttttcagtgtaaattacaacatgaattcatctaccaaaaatgaataggaaaagttggttgaatttttatgagacacaagagaaacttgatagaaatgccaggtggtttcaaggtctcctttgagcatcatgattattgacatataatcaaaccatttgccctgtggttgcagctttctccatcagcactcagtttcttatgaaaataagtgagggaagaaaaatgggacagaagtaggtttacaattccttatccatgattccaaactccaaaatgtcctgaaaaccatttttttccaaattattttggctgcaaaccaattttctgataagaactcatgtatagtctatatttatttaaattagagtacatgtaatacattttgctaaatatgtctattgttttatattatggggtactgtctcagactgttagaggtgttacgtaatgttttaaaaatttgaattctgaatcatgtttagttttaagggctttttgacaaaggtttgtagattcagcataagcatccattcagatttgacattttgccagagggcttaatttttccataactttttgacaaccttacctcaggaataatgccatgtgtgtgctgaaaattaaaaggtaaattattaagttatgcatttatatttgatctactattaattttatgagaaaataaagcacttttctgaagtttcccagaatgcaatgtgaccaaaacctttatgggaaaagtttttaaagtgataatttggctctgaaattcccttttgtgttcttatggagaatggatttatataatggcaatgtaatttttcatttaacatatttttcagtatgttacatgagaactgcttacctcatgttttgattactattcctgtatgaaatactttaatggcttaaaacataacacttattttattaatatcagctctcaaggattttgtgggtcaggagaaaggttgcagctgagcgcttctggcttggagtctctcatgatgttcactcagatggtagctgggcctggtgcagtaggcctagaaatatctttctttctatgttttctcaagccatcttcatatggtctctctatgtgagctatttgggcttcctcacagcataacagctcaaggctcttgcacaagggttccagcaactaaagtgaaactaatcttttttgaactaaccacaaaagtcacacagcatcccttctaccacttttatttgttataagcaagtcataagcctgacattacaagaagggaataataatcagagaggtactttgctacaccttaatttctgttaaactctcctgtcttatacctagaggagctttaatatgatccatatagctaaacttgtgaatcactacttagagccccattacttcatagttcggcagcttttgatacagctgccaactttctcctttctgaagcgtttccttcccttggcttccatgacaccacacttctccttcttctctgtttatatcttgtttcttcatcaattcaacctcccatagagggcttgatatgttgaagtttctcaagaacccaggccctcttgccttctcaccttgaaatttcatcctagacatttgtgttgatttcctgaagttgctataacaaatcagcacaaatttgctagcttaaaacacgaaatgaattctctcacagctctggaggacggaagcctggaatacttcctccagaggatcaaagggagcttctgtttcttgtttgttccagcctttggtggctccagatattcctgggcttttggctgcattactccaatctctgcttccatcttcatatggccttcttctctgggtctaggtattttataaagttacttggcattagttttagggcccacctggataatcctagatgatcttattttgagatccttcacttagttatacctaaaaaaccaattttccaaataagttaacattcacaagtcctagggataaggacacagacatatttggtttggggtggtgaccataaacaccattcagtccacttcagcatacttagcctattctgtggatttaattgccatctacttagaaattcatatctccagctttctgggtgtctcttctgagttctacatctatatatttataaacatgaaaacctgtttcacatctcctttagatatcagaaagattcctaacacagttgttcaaaatgaatctccctgtagatgctcctgaatctgctcctccagttcttatctcaaaaatggcatcataattcaccttgttttgcatgtgtttacagatgttaattattttattcacaatctgcatatacaaagatatcctgtatttaatacttcttaaatatttcaccagtttccccacttctaaccattctcaatgctatcactctactagaacacgaaatcacccactaagagtaaaggagaacattgcaactttaaggatgaagtgtccattatcagaagtctggatcccatcaccgccatccactctgaaaaataaggctggccttcactaccttcaatgacctctcaagtctttccacttccattagtttccactgtcactgttctagtgcagtcaccattatttttcccctgaatgattgtagaagcgcctaagtgaatcccagcctcaccatcattcacccctcaagctaccctccaccttgcaaaaacagtgaacttacaaaacacaaaactagtttgatcacacaagtgcctaaagcctttatggcttttcaatgatttcacaataaagtccaaaatacataacatggcctttcagcaagcgaccactctctccctctctaggctcattgcccaacacagccctacttgctctagaccatgacaccttctttcatatgggcctctacacagaatgcttctctggcttgcaatgaccacccgctctacttcatcagtaagtgaaaccctgattatctgtaaagttttgtctataacgctacttaattttatcttaatgccacttcttctggatagctctctctaaattataggcctaaatttatctctccattttttactttcattccatttcatacttctttatatcgcaaatgcaattgtgctaattatcactacacttcatcaaatctaagtctacgttatttaataaaactattgccaatcaaactgtgacattcacattcttattagttagaatttttgttttatcttaaagaatgagctgtttagccctatctacttgtattttataatattacattcttttgtactttgcattctttgttcaaaaaacaaaaatgttgattaaagtatgtataaaatatcttcattatccctcagagcccaaataatctgcactacttttccagtcagaatggttgatgcctgtgcttgctcatacaataatatctgctgtgtcatcaggagtattgatagtgtagtacttcttaaaagtgttttccacttttgtctctgggaaattgctgtcatccattctgaaaattttcatgcttatgcataggcaattaatcgcaactaccatggcacaactactggcaagccgtcaataattgagatgcaatactattacagagatgttaaaagagaagaaagaataatgtaaattttagaatctagcaatttgatacatatttatataattatttgattaattcctatccctactgataaattttcacatctgcccaagcagattttgtatgtttatggggcattccatttcattgcgtcaatcttcaccaagaatattacaaaaaatctgtatctagcagaccttcctctagaactctctcctgttggggagtttctgattacatgcctgcttggaggacaggtataagaaatcagctaacacctccaaggacttactgtgagtcagagaagagcaaagaaaaactcctttcaattgtgcccttctgagcaggtgaaggtgctgcctgagtccaccaccacacacagtgcatgaaattgctcatgaaattgcacaagcctgttgttttcacctcacccagttcatggcatcaaatggaatacctgtatctccctcagcacaccactgtgttccctctttgggctccttcattcgttgctgcctatgtggacacctcttcctccctaatatttctttccaatgttttcagctcttagactgcattactaaatcaccagtgtttttaattgttggcctatctctttgcatatatcaaaacaagactccagcccccaacaatgagggatgaggcaggacctcctgatgagtgctgagctggtaatgctaggggagcgctccagcatcctgctatccaaattaagcctgaagccactcttagtcaaagagccatctgaggcatgggaaatgcttacattcctccagaccaagcaaggtacacggatgaaagcagtgaggaaccaaactctggaaaagagagttttgaaaatgggagaccagtgaaggacatgataaatctcaagaagaaaggtgcaatctgaaataactcggctttggaaaacttagggacccagcatagggcactagcttctaatccagcactggtactaactggatacctgagctcagactttgttgtaacaaaagatcaccatagactgggtggcctgtgaacaatataaatttatttattatagtcctggaggctgaaagcctgagatcagaatgtctgcttggttgagttctgataagggccctctttcaggttgcagatcaccaacttctcattgcatcctcctatgacagaaagagagctagctctctgcactacatataatggcactaacccattcatgagagctgcaccctcaagacctaattacttctcaaaggccccacctctaaatatcatcacattgggattagggtttcaatatatgaatttggagtaggagggaaatacaaacattcaatcatttgatttggtcaataattgtttgttgaataaataaaagcctgaaatatgatgattcaacatagtgagacatataagaagaaagcaagaaataaaatattctgagacaatgcgaaacaaataaggcatcaccgcacagactcataaaataattatgtggaattgaataccctctatatgccaggttgtatgttaagagcttatttcaatgctagactgaggcactaattatgactcccattttatacatgatgaaaatgagacttagagtgtatagtacacagaataatgttctctcaaagacatgcctgtcctgatcagcagaatttgtgaatatattactttacatggcaaaatggatattgcaggcatgatttaagttaagggtcttgagatagaaaagttattttgaattatccaggtgtgccaatgttatcacaaaatcccttataaggtaatgagaggaggaagaagatgtgaagagaggagcagagttcagagagaaagagtaagagagagttaaagttgctatgctgctgatcttgaagacagagagtggggctgtgagccaaggaatgtaggtggcctccagaagctggaaaaggcaagggaacagatgttgccctggtgccttcaaaagcaatgcagccctgacaatatctggattttagggctctgacctccacaaacataatacaatgaatttgtattgttttatatttcaaagtttatagtaatttgttacagcaacaataggaaattaattccttaatacagaaggattaaggaattttctcaatgatctcattttctcagtgagggtcagctgaaacccaggcatctctgacactgagttttgtcatttctcccatcttagtagcaggaaagtcactcagaaaatagataaatccacacttgtaaaatggaagtgtctcaacctacttaacaggaattaggcatttttaacatgctgccaataatggtgaaaaaaatgaaccagataaatctatatgactgaaaaactgctacctgtttctaagtaccgagagaaaaactgttcatccaattttgttaagcttaaattctcaccagacatatatccttttactgtggactcaaatttgatcactattcaagtctttttcaatgtcttctctatggttggcttacctcctaagcagataaaaattgattttctaattctgtatgacttgttgcacaatatatctttttgtatgtacacaaaactctgaaagcttacttaaactctgttagctcatggttagcctcaaatttacaccaacttaagaattattttttctactaaatgttgtttaataatcattgttttatttttattgccaaattctagttttaaaaatggttggtaggaatgtaaattagttcaacccctatgaaacacagtatagagaaatcgcaaagcactaaaaatagaactaccattccaccagcaattacattacttggcatctccccaaagaaaaagaaagcattatataaaaaaagacacctgcatttggatgtttattgcagcactattcacaatagagaagtcatggaaccaccctaagtgcccatcaatggttgcttggataatggaatatcatacagccataataaacaataagatcatatcctttgcagcagcatgaatggagctagaggtcattatcctgagtaaactaactcagaagcagaagatcaaatatcatgtattctccctaataagtagaagcttagcaatgggcagacatgaacatcaagatggagataatagacactgggaactccaaaagcgtagacaataagaggtgagtgaggattgaaaaattgcctatttggtacaatgtttaatacttgggtgatgggcacactagaattgcgttccccacaattacccatgtaatacccatgtaagaaacaagcacatgtagcccctgagcctaaaataaaataaaatttttaagtcctcaatataatctatttatttctgagttaaataaaatattttaagagagataaatgtttcaacaaaaatatatttgtacatatcagcatttttattaataaaaatatttgccttattttgacttaataatgtatataatatcagagatattaaaatgtacaatatacaattaagatatacaatatacaattaagatatacaatatctgagatactttctcagattttactggggcttggagtgagtgaagaatccaatccatagcccttgttttcaaggagtttggttaggaaatcagaatatattgtcgaaatacaattcataaacaaatccctgaatccaaaatatcctaaaggtactataccctctctttaaaccattctccaaactgcaatcataacaagtcagattccagttttgttttacttccgtatcttttttggaagagtcagcttaaggtttcattgcacaactgggagctgaaatgttgaagaaaaggatgttgagtccctgaatatggaatacgggcaatggtataaggcacacgacttggtcagtgggtgacagactttagtaaatgcagtgtataaggggaaagggacctgtgattggacaggggggtcgagatcacagaaaagcctgaacactgcactctgtgattagtatttgattcttctatgtttaagacattattttctcaaaaatgtttagcacgatatagaacttaagagtacagggaggaaagccagcttgcttggttctttgccttaatttcctcatcttgaaaatgggattatatatagatcttatcctaatacagtgactgtgaagataaaatgtgttaatatagaaaagtgtctagaagaatgactggcacataaaaagtgctaaagaagtgttttttactattccacacaacacagatgttgaaaagagttcaggcaaagctacatgtgatttccctttacagattattatttcaacagctttgagaaatttagtagggaaaatttgttttccatgtttattttagtactattcacaatagctgagatatggaatcaaactaggtgctcaacagcagatgaatggataaagaaaatgcataaaaaagtactactgagccataaaaaagaataaaatactgtcataaataaaagaataaaatactgtggcaacatgaatggaactggaggatgttatattaagtgaattaagccaggaacagaaagtgaaataccacacgctctgtcatacgtggaagttaaaaaaaaaaaaaaaagttgatttcatagaagtaaaaagtagaacagaggataccagaggctgggaaagatagaaggaaaggaagagatttgttaaagggtacaaaattacagttagataggaggaatacattctaatattctataccattgtaagatgactataattgacaataatatattactatatattatatagagtcaaatggctaaaacgaggaatgcattgaacattcccaacataaagaaatgacaaatgtttgatataataggtatgctaattaccctaatctgattactatacattatatgtattgaaacaatgttaggtaccttccatgaataagcacaattattattatttgtcaatttaaaaattaaaggaaaaaaaagaaagaataggtaagtgtggtggctcatgtctgtaatccccgcgctttgagaggccacaggagaggatagcttgaggctagcagtttaagaccagtctgcaacatagtgagaccccatctctacaggaaaataaatatattagcttggtgtgatgttgcatgcctgtagtcccagttactctggaggttgagataggaagatcgcttgagcccaggagttgaggctggagtgaactatgatcgcaccactgcactccagctgggatggcagcaaaaccctgtttctaaaaataaaaatccagaagaaagaaagaaaaagtaatttaattttactttagccagcgttttacaaaattatgggatttcagatttttgttattatttatttctttattatttgattgaagaactaagaattttaatagcacttattaatattctgtgatacagtttgggaaatctgttttggagaatagagagtatttctttcatatctaagacaaatacagtcaattcttactatttgctgtaatgggttctataaagccaccatgaacactgaattagaaaatactaaactactgctcctagggtaatccagagttattttcccacaagcctctgcccaagacattttcctcaacctaaacaccatttgtagtataaatatttgtttgtcaacatcctcctaaaactagtcagtctcataagaatagaaaacctgctctcccacctaatcctatttctgtatcccacttagcaggtattcttaaaattcttccacagcatcctaagctgcagaacctttctcacctgaaaatttaacatattcatgacacattgcctttcaaaatatgtaaacttctcagcatgagccacaaagagcttaacattgtcctgaccctgggttacatgaccatagttttttgactttcagcctcacaacaaagctgtcccctacacatttttactggttgtcatctcatgagcccacaaatttagccagttttccatcttttctatagtttcattatgaactataaatgttaactttagctctttccagagtaacctcttatcgagataagaaaattttctcttcctttttctggatgtactatgctgttgattcattaacattgaactgacagccaagagtactataacacatgcctgaatgaagcctttttaacacacatatattctccagaaggcacaccttttgcacttagaaacactagatagcagttcagcattacatttgaggggccaatttaaacagagaaattatcgacaaaaagcacaaaaatgtgaaaaacatgacgctaaaaaagatcgggaaaaagacactcatttactaaaagcagggctgcaaagaggtggcagagcatcacctttttcaacatcagctgggaacctgtgaaacctgtggagtgacttaatttttctctctgtgtgtgtccacaaatgcctatgaaagcactgcaagtattgattttggggttgcaaatacattttaacaagtaggcttccagcttcatccatgtccctacaaaggacatgaactcatcctttttcatggctgcatagtattccatggtgtatatgtgccacattttcttaacccagtctatcattgatcgacatttgggttggttccaagtctttgctatcgtgggatggggggagtggggagggaaagcattaggagatatacctaatgtaaatgatgagttaatgggtgcagtacatgaacatggcacatgtatacatatgtaacaaacctgcacgttgtgcacatgtaccctagaacttaaagtataataaaatcaataaataaataaaataaagtaacaagtaggcaaattcaggaataatgaagattaactgtatatcgacgacactgtgtgcaagagactttttgaatggaggaagaagatactgccagtaagaatatagacgaagagattgtgacctctttacatgtctctgatttctgtaaagactacaagatcaatattacacaagactaatctcagtagcctgtatttgcatgtgttacaattgtatggtcactttataagggaatgacttattaaagtccttggttccttcaggggagatctaataaagagaaatagctgatggctggactaatacaatagcattatctgtgatgctggtcactttcgtaaagggctgtgttcattaagagtggtatcatcaagacacatcaggtggtgtgtagcctaatctaacattcagtttgtctaaagcagaaatccagtcacagtatagtttggtcataaaatctatatatgtacagaacaattcaatatttattataaaatcatatagtttaaatatgaatggaagctatttatgaaaaacaaacttatgagtcatatgaatataaatcattggaaattatacctgtcaatctcatatcatccatccataagatatttcccaaaaaggaatagatgatggatacttactttttgataagtctcaaatattgtttctaaaacatttttcaaatcagtctctcattttaatcctgctaccacttccctggtatagactttctttagccctattctgatcctattcaatagcttatcacaagttggtaaaaaacctccaagatcgagcaacaccggcagacggagctggcagctgaagggccagagaaagccagctctcgcttggacagacaccaacctgcaaagacacttacatgcctccgctttacatacggagaaaggggtttctgatggttaagggtctctgaatttatcttctttattaaacaagttatgatcatattccctaaaatctaaaacatttaatgtttggacttgggcaacatagttaacctcattaagtctgggcttttctcatctgtaaagcaagtatagtaatatggacccagcctgctctctgtccttttctgtgcttaaaatggggaaagtaaatgtaaaaatcaagttaatcagatgagttatggcatgggattcacttgtaggatttacattggctttcaagtcagggctttgcaatgttaattttggctattcaaatacttttcgctcctcgatttcaagctcctggcagtgctacatagagatttttagatctctgtgcctcaaatatgtgggatattaattatgctctggtcatgcctgcatggaaaggcagttacacttcagtgtgcggcagtcaagacctctacttgataatcagcgtcaaaaatcaattcgcatttgagataaatatttcatgttttaaatatttagaagaggtacgtttatttatcttttttaaaataataccataagtggtaaagttttttagtaaacacctttggtttgtacacttctgaacaaaaatcattttaaacataatggaaattggatcagtttaactgcaacaaaagcttcctccttgtttgattttaaagggaatgcatctccttatgcgttctgtccaatgcaagtttcttctcactccaccaagtttttgtaacctttcatctctaatgttttcttcaaagcaggaaatttctttaacaaaaggaggaactatttagatatcggacaaattgacccagtagctgagaagttgcaaaatagcttttggatgtgatttttcatgattggctagagagtgtgtgccccttaagtgctttcatatctgtctttctgaggaaagataaactgttctttggcccaaagatgagataacactcctggttgtgaacaataggcgaggagctctggcaggattgctaaataattcttcagtaacttcgaacagactccacaggcttgctttgattagcaggaaggatcatgaagcagagtggaactatgtgatgatgtgatgttagaactggcgaggcagaatctactctgaccttttgaccttacacacaggcagtctgggagacgggaaagaaaaagctcttggcaaatttcctataataacttatttaaaggcatatctaattttggctgtgttttttactatatttatttacttggcaaggcattgaattccataaaggcagaagtcagccagtctgccagcacatttgacatgatggattgtctgtctactgtacaatactctgaacatcagcattttgggggaggttgggcagaagataaaaagatctagatttagtagttattgttgcattgttacaagaaaaagtggtgccagctcctaaagatataaatagtaaaggaattgaggcctgagggccaggggtgaagggttgtctaagctgaagccctgtcagtgttgtattgtagctatttatatgatgaaattaatcacttgaaaacaggtcaaggtgaagtcagagtgcttgaagcaattgtttgtactttatcaaagacaggtttttcttcttccatcagtcaacatccacatgaaagccattgagatttgaaagaaatctcacctgtgccactagctgctgctagctaagtctcaggttttcctagtagtctgtaattctagaaatatcaaatagaaaacagtgttacttagataatgatattttggcagggtataaatttggatcttccaagtatttctctttcctttttgtgtacctatttagactgcagattttcagtgaaaatgccatatttgtgttgatattgttgaaatccttttttacctaaacataattgtaatcaactttgaattctgaaagggtttgtactataaataggaaaaacctagatttctacataacatgatacacacctacacacacacacacacacacacacacacgtacactacgtcaattaaaaaccataaaatttctagagaaaatgtaatagaatatctttgtagcaggatcttagaatggtatcttaaacaaaaataccaaaaacacaaatgtaagacaaaaaagataattttcaatatgccaaaatgcagatttatagtctatgaatcataacatagacaaaagttaagaaacagatggaaaaatggaagaagatatttaattcagaaaagaaacaaaaagaaagattatataagtctataaatcaacaagaataaagatgctcctgaagaaaaaaagcaaaaatcatgaaaaagaaattaacagcacataaagacacactcaaaatcactagatcattagtaatgagagaaatgtcaattaaaacaaggtgttactttgcaccttttaaacaaagattaggaagctagaatgtcatgtattggtggaaattcaaggacataggagccctcaagcactgttagtgaaaaatgctattttggagagcaaatctacttctctctagatatgcaggatagaaaggatatagcccgcacagctctgcaattctcctgctggatacgtgactcaaagatagtctcacacaggttcacagggtatacttgtaaggtgttcatcgcagtgttagaattgggaggcaacctgggagtctaaccctgggagaatgaccaggtaaaacgtgatgaatggacaccatgaaatgtcaatcagtagttatgaacaatggattcattactcaaaacactatgattgaattttaaaatatagtttttagtgaaaaaagcatgaaaataatagtatatatgaacacaatacatttatataaattaaaatttcatgtacacaaagcatgcatattttgcaaaagcacttatacaaaacatggtgcacattaaacacgttacaaaggaagtttatggaaattggagccaggattgaagaaaaaaaggtgaaagggacaaaacaaatcaatgaattaatttttaagatatatgagcaggagaaaatgggggatgagcatgaattctggaaggttgaatagaaaatattcatcttcctttttggtttgtcatgttggcgcattcttgtacattgtggggcacacaagactccagcgcagttattacataaaccaaaaactcggcaggaatttgtcctttggaacataggtactctcttttcatttggtctttatgtgtgtcttttattcacatatccaaactcagggatcagccacagaagtaagatgagatggatgaattgttgctattgtggaagaaagccacactgtattaaatatctgtaaattagtacaaccactatgaaaaacagtatggtttccaaaaatatttaaaacataactaccacatcattcagcaatcccactactgagtatatatacaaaggaaaataagtcagtatgtcaaaaaaaatctgtacacccgtgcttattacagcactattcacaatagccaagatatgcaatcaacctatccatcagtggataaatgaataaagaaaatgtggtatgtttatacaatagaatactactcagccataaaaagtaggaaattctgtcatttgtggcaacatggatggaactagaagaccttacgttaagtaaatcagacacataaacatgaatactgcatgttctccctcatttgttggaattacaaatgttgatctcaaagaagaaaagaatagaatagtggttaccagtgattacaaaaggtaaaggaaggctaggaagaagttggcttacagataaaaaaaatacagcaagataggaggaataagttctagtgactaacagcattatatggtgactatagttaacaacaattttttgtataatttcaaataaaggagaggattttgagtgtttctggcatgaagaaataatacatatttgaggtgatggatatgctattaccccaattttatcattacacatagtatatatgtattgaaatatcacaccttaccccaaaaatatgaacaattacagtgtccatatttggacacaatgcaatattctttttctgttggaagtgcatcttcttacatgtatggttcctcagtaattttcaaatgctccattaaccagagggcagtatgtggcatttttcacttaccaaatataattcagatatctgaatatcctcaatctttaagtgttcttgtccaaaaagcatctcacatgttttatgccctctgagttaagactatgtccaggtagatggagatcaatggggtgttggggaattttggaaagctgttagctcgagattgtagtaccaagtgggagcctgcaggtcagctaccctgaacatccttggggttcactctattctctcattaaacctaagcctgtaatcaagaggaaggagggccactgtcacatcctgcataaaaaatgtagctactaattttagtccacttctgcctgttggaaccttaagatcaaagtcccataattgagagaagcaagattgtaaatagattgttgttttgcttgcccaaggactgtgagaacagttaaagaaagagagagaaaagtaagagagaatgctttctttttttcttttggaaaaaagagggagaaaagaaagagagaatgctttctttttttcctcttggaaaaaagagaggctgtttttgctctctttgagaatcctcacggactcattcaaactagaatcctcaaactcacactgactgtgatgagttttccggaatgaaaattataataccagcacgcgttccatatcttctttctctttcctgcctccacctgcagcaagccctcgagtatctatcaagctcccctttctaacagatgaacccgctgggctaactctcctcttctggttccaggatggaatcagtcttgtctaacttcatgcctggaatggcaataggtttccattatctatgtcccccttttgctcacctttggctgttatctagtctggtgtctgaattccttttgtccacatcttcttccctagtgactgcatagcttgtccaggttgtttctccctcacatcagttcttgcaatcttctgacttttatgcaggtttttttgatcgtctgtgtttttttttctaggacctatatgcatctgcctgttacagaatttttctatgctctagtttttcacttgccagtgtagtttaacccaataatttgttcaataggcactgaatgcaattactcgtggattttcttcctccaacttcagcatttagaaaaagatattatttcaaacctagctcattatcatgaggcttttctgccttctttcttaaacatttaattctccctcccatgtccactctggtttctaggttaacacagacaatgcaatttcccacaaagcctctgctgcaacctcttcatttctttctaggaattattcgtgccatactgagtcccaactctgttaattctgatacctaatccaggaagacatatcctggaataagtagtagataaactatgcttccgatttctccttaatctagatgattaagcgtagaacttaatcatttataggaataaaatcccccatttattttccataaaataagaatacagatgaaaatgaagaagaaaaaataaagtaaaattacaatcaggtcaccagctgttagaagttaaattgtgcccttccattcaccactggcaaaaaaaaaaaaaaaaaaaaaaaaaaatacacacacaaatacacacatatgtatatatttaatgtgtgtatatataatatatattttatatatatattaaagattatatatattagaaaccaaattcctagtacctcagaatgcagagtgtgaccttatttggaaatagggtcgttgcaaaggttattagttaagataaagtcataacttgagtaggattttttttttttttttttttagatgaagtttgctcttggaagcatggaaggcatgctcttgttgcccaggctggagtggagtgcaatggtgcaatcttggctcactgcaacctccacctcctaggtccaagtgattctcctgcctcagcctcccaagttgctgggattacaggcactcactgccacacccagctaagcgtttgcatttttagtagagacggggttttgccatgttggccaggctggtttcaaactcctgacctcaggtggtccatccacctcggcctcccaaagtgctgggattacaggtgtgagccaccgtgcctggccaggataggttcttaatacaatataactgatgtccttatacaaagacaacaatgtgaagacacacaaacacagagagaacttatgttagttcattttcaccctgctaataaagatacaatcaagactgggtaattcataaggaaaaagaagtttaatggattcacagtttcacatggctggggaggcttcacaatcatggtagaaggcaaaggaggaaaaaggcacatcttacatggtggcaggcaagagacagcatgtgcaggggaagtgtcccttataaaaccagcagattttgtgagacttattcactgtcacaagaacagcatgagaaaaactcacccccatgattcagttacctcccacctggtccctcccataacacaagggaattattacaattcaaagtgagatttgggtagggacacagagcaaaaccgtatcatttcacctgtggctcctccaactcccaaatcttatgtcctcacatttcaaaacaaattatgccttcctagcagtcccccaaagtcttaactcatttcagcattaactcaaaagtctacagtccaaagtctcatctgaggcaaggcaagtcccttctgcctatgagcctgtaaaatctaaagcacgtttgttacttcttagatacaatggaggtatggtaattgggtaaatatacacattgcaaatggaataaataggccaaaatgcatgggctataggccccttgcaagactgaaatccagagaagcagtcaaatcttgaagcttcaaaatgatctcctttgactccatgtctcacatccaggtcacactgatgcaagaagtgggctcccacagccttgggtagctcgggccctgtggctttggaggtcacagtctccctcccacccagctgctttcatgggctgtcattgagtgtctgtggcttttccaagcacacggtggaagctgttggtggatctaccattctggggtcagaaggatgatggccctcatctcacagctccactaggcagtgccctagtggggactctgtgtgtgtgcttagaccccacatttcccttccacactgccctaacagaggctctccatgagggtcctttcccggcagcaaacttctgctggacatccaagcatttctatacatcctctgaaatctaggcagaggtttccaaacctcaattcgtgacttctgtgcacacacaggctcaacatcacatggaagctgccaaggcttggggcttgcaccttctgaagccatgggccaagtgaaccttcactccttttagccacagctgtagtggctgggacgcagggcaccaagtccctaggctgcacacagcagggggaccctgggcctggcctatgaaactgttttttcttcctaggcctccaggcctatgatgggagtggctgcagtgaagctctctgacatgccctggagatattttcctgattgtcttggcaattaacatttgactcctagttacttatgcaaatttctgcagccagcttgaatttctcctcagaaaataaatttttcatttgtcttgtatcttcaggctgcaaattttccaaagttttatgctctgcttcccttttaaatgtaagttccaactccaaacaatatctttgtaaatacataaaaccgaatgcttttaacagcacccaagtcacctcttgaatgctttgttgcttagaaatttcttctcccagataccctaaatcatctttctcaggttcaaaattccacagatctctagggcagggacaacataacaccagtctctctgctaaaacatagcaagagtcacctttattccagttctcaacaagttcctcatctccatctaaaaccacctcaacctggacttcattgttcatgtcactatcagcattttggtcaaagccattcaacaagtccctgggaagtttcaaactttctgacatcttcctgtcttcttctgagccctccaaactgttccaacctctgcctgttacccagttccaaagttgcttccacatttctaggtatcttcacagcagcaccccgctacccagtaacaatatctgtattagtcagggttctctaaagggacagaactaataggatagaagaatatatgaagaggagtttattagggtgattgactcacatgatcacaaggtgaagtcccacaataggccacaagctgaggagccaggaagccagtccaagcctcaaaacctcaaaagtagggaagctgatggtggagccttcagtctgtggctgaaggcctgagagcccctggcaaatcactggtgtatgcccaagagtccaaaagctgaagaacatggagtctgatgttcgagggcaggaagcacccagcatgggacaaagatggaggccagaagacttagctagtctagtccttccacattcttctgccagcttttgttctggccctcctggcagccgattggattatgcccacccaaattgagggtgggtctgcctctcccagtccactaactcaagtgttaatctcctttggcaaccccctcacagacacactcgggaacaataccttgcattcttcagtccaattaagttgacattcaatattagccatcacggaactccatgtgaagatgaggaaaggattggagtgatacatatacaagccaagaaatgccaaggattcctggtcattgccagaagctaggaaagaggcaagaaatagattctccttaagcaccctcaggagtcaaccctgccaacaccttgatcttggacttctgactttcagaactatgagacagtaaatatctattgtttaagtcacccagtttgtgctactttgttgcagtagccctaggaaacgaatactccagctctgattgattcaagaaacaaaatatttaggggtactaatattgaattaataggttgctcaattattaaaatgaagaataagactgttaccaacatgaaaattaagttccaatttgcatagaaataagtgctgtcccttgtagtcctgttccaactgaatgtcatgatttaggaagaacaaaactgtttcttctctataaaatatatttttccacatcataaaacttacatattctattattaaggaataaacattcccagcaacttatttgatttcatgtaatagtgaaacacccagtagaggaaagaatgcattttatcatagctacatgatccactttttaaattgaattcatagtataaccagtctgttactaggaaaaaaaaagtgaaaacatgctgatcaattatcagatctccctgctgcttcagtctcttcagtgtactcaagcatgcgtatgagagagagagagagagagagaataaactcacattcctaactgtaagatatatatgatagaatataatttgattttttaaaattgtagaaatgtggatgatacagattctccaatttattctgaactacttctcacaacctgcttttttactatgaacttacagcaagattataaaaagatgtctgtggattctctaaaggctgcagaattgtgtgataattgctcatttctctttctctacaggctctctgagactgggtccttagtcatagtagtgcaataactaccattccttgaagacttactatgtgccagtcacagtgctaagatttcaatcattggtgcattaaacagcaaatacaacaggtttgattggcataggcgcccattgttccaggtgtttatgtactggaagccactttaaactacaggattgacaccagattaaatttttctgacatcccaatgtgttttcaaaatggtgaagaataccagacagtttattattccaaggtagtgtttgttttgctttacagacatatcctgacttttagtacaactttgaggcttggagtcctccttttcaccactgaactcattttgcaacatgcaattgccaatagctggcagtcatataattttgaattgatattcaaaattatttgtcagtttggtccaagaactgttaaatataagaaaaatgtttactcatttttcctttctccagaagaatttgaagaatttctaatacagtgacttaagaggaaattaaataaagtccaaatcacatttttgttttctattttttaatatttgggaatgctcacttatgttattcttcagattcatttctttactctgaaattgacacaaattctaagaaacaatgtatcttacacttcacttcctaaatccaaacaaatatactgcaataaaaacattcacctctgttaatttggtcatgagcaaattatatctattggaactacataaatattgatgaccagatttgggtataagtttggcttaaattatatgtagttataaaatctgttttagtaatttctttctatatgacttgattctttctatatgacttgatgactgagtttaattgccttccactgcctgtttcatctgtattaatattgttcttacaattggactaatggcttcacaggtaagttatcagaagtactaatggaattcagacatttgtagaatgttttctacttcaaaaaatgactgtatataattgtatttaggtctcaaagaacactgtctttacttgaccagggaaaaaaatgagaaaagttgaattattgcaatggtcacaaaatcaacaactgatagaattggaacaagatctatattctatgctctttgtaacaccttctacttctgctgtattctctgttactcacacccaggataaccataaaatctaacacattgcttttcatagcatttatttttaaaaaagtcttgggagagaaatagaccttaatatcacccctttcttctagcaggtaagatgttctttcctattttacaaacagagaagacagaggcccatagaaattatgatttgtcttaaattaatgtgtgatgaaatgtaaattatattaaagttttccttcttctggctatactatgcactatcattttagccaaaatttatttttgtttaatgtttatcagtgaaagactaaaatgctgttcatatttgaggaaaataaaatttcccccaaaaaagacatttcaaaagtaaaaattatacatggcattttatgttcttttcactggcaggcaatctacaggaaattatttaaccatgagccaaactgaagtgtcaacttcctgttatcaggacaacaaaaacattatggaaacaaattcttggttttgaaatttttatggcatgagtactcatgactataaaccaaacttttaagataagaagactaacttgtttctcaacatcaaataaaatcaccttattacatgtatttatcttctctcagttttttctgtgctttgtgaagcctcctcgagccatggtcaccttaaaaatggatcacagttatatagggaaaaaattaaaagtcaaattgtcatttatcttaaatattgaatgataattgatatcttggtttgtcccatatgatgagttgtatgactcttggaatataataggctttctgaatgactgtaaataaatttggaacaaaagtcagtaaagaaaaaagtgggagtcatactttttgtcattatcatatcaaacaaacacaaacgcttttaaccatacctaaaaaagttgagtttcccagatttagggaaactgcacaatctgaaaacacagtcacaagactatcctcacttcaggtaccagctgtctttgaatgtccccaggaccgcccttatttcagaccagttggtaacaaattcagaggttaccacagccaccttgggttcaaaatttcactagaaagacttacagaactcactgaaaataattgtactcacaattgcattaatcagaggtctaggatacaaattaagaccagccaaaggaagaagcacatagaccaactccacagcaaccccatgggattggggaatgggcagcaagaaaaaaacaatataaacctggacttaattctgcctactggctagtgactagtaactaaagtctagtaaagactagtaaactctgccttcttccagcatccaggcaactgtggcaagctaacttatgattggttaaaatttcaaatccttcatagctcctgacactagttactgccagtaaagtggtaagctcatgaactgataactctaaatattttgtacatatatttgtttatatgcatatgtattttatgcacttttattttctcacttctaattcatttcttatcagattttctgctcaccaccactctaataaaataactctttcaaaggtctccaatggcttccaaattgccaaatctagcaatctatgttcagtctcatcctgcttgaccttgccaagttattagtatgttctccatttctgtaagaccaacccttactcttctccttcttctcagcctactcaatatgaaggcaaagaggacaaagatctttgggataatcacttccaattaatgaatagtaaatatatgtaacatacaaaatatgtggtaattgcctatgttattggtaaggcttccagtcaacaggaggctattagttaagttttaggggagtcgaaagttatgtgtgggtttttgactgtgaggaggtgctgctaacctcaccttactcaaggatcaactgaatttatcccagaatccccttccgtacgtggtctggatttgagttagataaaagagaagctttcttgagtgaagagggcatttattttggaagactgtggtgggaggccagggtgagaggaagtcccagggtgttcactgggctctagtttcagctcatctttctactgttttcatcaaccaacagcagccccaagccaaccaccaagctctagcaaggtgacagcttcaacagacctctcttcaagcactgccttatttaagtcccaattcagcggccaaggatgcacatcttctggaacttttctgcaatctctgacctggccatccagaacaggctgtcacggttagtgacttttgctgaatatcactttcctgttcccgatcttcacatgcccagttctttccacatgattgtaatctttaatttccataaaaaatttcttctacttataatatttcttgtgcttttttttagactgaatgctaagggatagatgtgtgaaatttcaattattgtttttagcaaataaaccaaaacttcatattctatggctaaaagtgtggtgttcctcttacacgtgatgaaaggcagggactgactcaaaatatgtatgcctttcaaaactctaaaaataaagcatgtcatcaggctgtgacagggataaacatataatgagcacatatagaatcccaagagttaccttcactggtcacatatgtagccttctgctatcgactgaattgtgccccactctaattaatgtgttgaagcccaaacccagtatgactgtacaaagagacactgtctttagaaggcaatggaagtttatttaggtcataagtgtggggtcctaatctaataggactgcggagatttataagaaggaaaagatctctctctctctttatctctctctctctcttcctctctctctcaagcagtatcctcatgtataaaataattcttacagaggactaggtttctttctgggaaccccttcaactcttttctgccccaatcgctcataacatcccactttatacacttcatagtcctcacactcatctgagcctccaacccaatcacctcccagagtctattctaccttgtgcagctataacatcctaattttcaacttccactctttttttactgatttaatactgcggaataaatcctatatgaaaatatgtacttaccactgatcttccatgtaaaactctgaaaccctagtagttgacaatttagaaattctgaatacttgtgctcaatttatatcataaattctagattattattgacattaaataagcagacaatatcacaggacacttcatcatctgaccttgcttgtctttctctaactacatttctcccagctccacttctctggtcaaaaagaatcatgctttcctttctttcaaacatgctttacatacgctattttcactgtctggaattcactcctgctgcatttcccatgtcttacttatccttgaggtctaaagttaactaaagcattttccaaaggattccttgaccttgaaagattgagtcttgttcttcctttactttctgacttactatggataacctctctaagtagactctctactttttaacagcacattattttcttgtttactagtgccctttccaatttatttgtttattatttatagcatattagagaaatagcctataaacattaagagagtaggggccatatatgtcttattcactcttttttggaattcagtttctgacacaatgaaggtacatcttaagttgactaaatgaatgacaaaatacagtatgaatgaagaattgattaaatcattaataactatggtatcaatttccctccacattaccttgaaatcagcctttattagtcaatcttgcacactggaaagctggaaggcagatgctgtatctagccaattattttatcaccaattccaacaggaactcatactcatagatactgtgctgctgttagaatagctgtccattatctctcaaatcatttattttctcaactctttgtcttgccctctttgttctcattttttcttccacaattgactagttttcattcatcatggattagtcaaccgcatctttcccataaaacctacactcaaagtagagtgacttttccctaaattcctatttttcccagctttgacacttgacaatactctgtctttcaaccttttgggaagctattgtcttgcattgtcatcaacttttaaacacgtgcataacttgttatctcaattaaattgtaatttttaaaggaaaggcatatagcatatgactacctcttttatattcttaacaatgttgagaatagtgcaataaatgaaataaacatcttcactgaatgaatgaataaacatatcacttatggaatcacatttttatatttaatcttccaggaaaataattactttatttgaccttgccaaaacttcttgaaaacaacatatgtaactttaagccatatttttcaataaataacatcttcattactctgagtgaattgtaagaattgactcaattaccaagatgaccaagccagcttcaaggatgtgaccaatacactgtgagaatttgactcattgtatactgggcttttcacttggctgtttaacaggagaaaacaggaaagaagcacacagtcaagtgtgcttgcagtggagaaattggtgttcagtgttctggacaggctttaagtcctctgggttatatccaagcaacacagcctcagagctagatcacagaatcaagacaccagaattctacttctgtgtccaacatttagtgcaatcagatggaatgcaacattgaaatatgaaatgtaatgttttagttaaatcagtgttcaagctggcaatttattatatgcagcctgttcagaattgaaaaatttgctattgtctagactgtgcttcagacaatcagccacaaatcccaatgtagaggttattctgtggttgcataacttaaataaatttcctacctcaaagtcattgacaaaaaaatactggaataacgaatccctagtaaagtcagatctcgtcaaatagaagttatttatagtcatatactgtgatagatggccatattcaaagcatttgatattaaaagtctaaaatcaatcttactatgtatacataggaagttgtcaagctaatttgacactattacacagcatttaagtatgcaccaagtctagaatgttcaattagacaaacttacaatacctaagtaaagttatgttagtctagataaatcatacttatttattgaagaattctaatttgaagaattccagacagcaagttttattctaaaaataatttataatgttagctgcaaatgtcatatatcaataagattgtgtaaaaagccctaaatttttcatccttagaaagcagttaatcattgagacatgataacaccaccaaaaaagattaccctatgcagttcttgaagtacattttgcttctaataaatttaaaaagataatttccacataaaggatatattcaaatcatggcaataataaaagctaagaagtgccatggaattaataagaccttgcccacaaaagcaaagagccaattggcaataacattgtctaatggaggggcagaccgctggaactctccttgcaccgccaagagagttagaaagttatgaccaacaataatttggtcaggggaaaaagctcaaattgcataatctgtgaaacaaaaaagaagtctgtgtgccattagttaatttcctcaaattatacaaataagctctactgaagtttaatgacagacatattgagtgagattatctcaaaactcttttccaacttttaaattttatgactttgtgactgtctagtatatttaaatctgaatatagatcgggcagaaataaaacaaataaaattctctccataatgctggatatatttatttgatttttttcagaagctcgaaaaagggaaaatttatcttcattgaactttctttgtgtgtcttttcagcactggaacagttagtacagagtttccttccaagcagtatttttcaatgacttttaaaaaataaaagggaggaataaatgactacctgataagaaacaacttcctgatgtgcaatgccatgagaaaaattgattttcaagtattaaataaatgtctaaatatattgattattaaaataagaactatgagtcctcattcacaaaaaataattttatcctgtccacttaagataaaaagaattgcacttgaacactctttggtcatttttaatgggattagattctataactgtattattgagaggaaaatataatattaaactgtctaagatttgtggccaggtgttactcatcaaaaatttatgagatcacttgaaggtattcatttcaaagtttatatcctgttgaacacagtcatttatttatttatttatttatgtatttatttatttatttattttctaaccagtttttaagaaagagcatgagatttggaaagagaagttcttagttcacattcaggctttgacttttacaagtaatgtatcttgggcaaatcactaattttgctgcagataactttttgtgtttgagaattgctaagatatttacattatgcaaagatataattgctttgtaatctatgaaaatatattaaaaatgtcaataggtaatatgggaagaatagctggctgtccatcaaaatctccttcccatttttactgtatatggttgtggttccttaaaggagctaggttccatttccaagaccaccttgcagctagctgtggccttgtgactggttaatatcaacagaataagtaattgtgtatgccactttatgatcaaggtaataacatcattcatcctccatactcactgtctctttccacaaaataaataaaaatggttatagccccatgggatgacagaagatgggagaaacttaggtttctgcattatggatatggaaaaaaatctgctcatggatcaggaataaccaccttggactgttactatgatggtgaaaatggtctcttgtgttgacccattatatactttgcatgtatattttatcaaaccttagtgtatgcttcctagtagagaaactgataccttaaagtgaagtgtttctatttagtaaaccactaaaatacaggacatgggaataacagctgggcagtgggcagtgtggtggtgaatactgagtgtcaacttgattggattgaagatgcaaagtattgatcctgggtgtgtctgtgaaggtgttgccaaaggagattaacatttgagtcagtgtgctgggaaaggcagacccacccttaatctggatgagcacaatctaatcagctgccagtgcagctagaacaaaaagcaggcagaagaatgtgaaaagactagactggcttaacctcccagcctacatctttcttctgtactggatgtttcctgcccttgaacatcagactgcaagaacttcagctttgggactcagactggcttccttgctcctcagcttgcagatagcctattgtgggagcttgtgatcatgtgagttaatattccttaataaactcacttttatttatacacttatactattagttctgtccctctagagaaccctgactaatacagattttggtaccaggagtggttttagaggaatagaatattaaggatggagttctttcattggtttgggggtttctggagttggctgcttaatgtgattagacccaaaaatgctaaggactctacttcttttttttttttttttttttttttgagacagagtctcactctgtcgcccaggctggagtgcagtggtgcgatctcggctcactgcaagctccgcctcccaggttcatgccgttctcctgcgtcagcctcccaagtagctgggaccacaggtgcccaccaccacgcccagctaattttttatatttttagtacagacggggtttcaccatgttagccaggatggtctcaatctcctgacctcgtgatccgcccgcctcggcctcacaaaggactctacttctaatagtatggagaacactgatagtccttggcatgaactgtgtagatgcatttgacactcctgattcactgcacatgaggggcgaggagtttagtgactcatacataatacctttgaccatatgtggagaaccaaagaacattatgaagttggttggttgcttctaagttcactggacaaagtgatgtaagaaaattatgaactcaggaattctaactcccagttacagatgcagatactgagcctcaaatctcctaagattgccctgagtgagacttacctcctgtagagaaaaagctaaagttgtggaaaatcagacacaggctcttataatgcgagcaactgacctgcaacaaaagatgtatgcacagccttgccaggtgtctactgttaaagtgagggcattgattggaaaaaaatgagaccctgcaagttggaatggggatgtgtgggaggaccctgatgaagctggggacactgagattgtaaactctgatgaaccttttttgccagaagaaacagcttccccatccccagtagtggcaacattccctccccaaccccaactgccatcagcctttctatctttgtctgaggagataaaccctgtgctgcctgaggcaacagcaatggcctccgctgaggcagtttccaggcaaggtaatgttgattctcctcagtactcaccctcaacacccctgattgcttctagacctataagtagactaaagtcccagcaggcccctagagatgaggttcagagtgtgacccatgaagaggtgtactacactcaaaaagaactacttgagttttctggtttatataagcagaaatctgtagaacaggtatgggaatggatattaagggtgtgggataatagtggaaggaacatagagttggatcaggccgaattcattgatttgggccccctaagtgaggattctgcatttaatattgctgctcggggagataaaaaaagttctaatagtttgtttggttaactgaaatatggattaaaagatggcccactgtgagcaagctggaaatgcctgatttcctcccttgatttaatgtagaagaagggatccaaaggcttagggacattgggaagatggggtggattagtcacttcagacctactcatctcatctgggagagagtccggaagatatacccttgaccaatattttgtgaaatagatttgtgagggaagcacctgcatctctgaggagctctgtagggactgctcttctctgtatgccagatctaacagtgagaactgcagtcactcaactatgaaatgtaaatgcaatgcgaataattggatcctgaggtggcaggggccaagtggcaacactcagccatcaaaagcaaggtgggcatagctaccgtaatggacatcagaggcaaagcagcaatcagaatagtgtgacttgtgtagaacgctggcattgtctaattaatcacggtgtttctagaagtgaaattgataggaagcctactgcattcctacttaatttatataataagaaaacatccagatctagtggacaaaaaactaatttgaattataaaaacaaagaatcatagctccttaatcagtttccagacttgaactcgtttaaagacccagaaccccttgaatggagagcaggctgggtccccttgaggaaggaccccactacactactgacaatttatgcagttatcctttctcccatccttccccacagagacctctggccttttaccagggtaaagtgcattgaggaaaggaaaatgatcagacatttcagggactactagatactggctctgagctgacactgattccagggaacccaaaacatcattgtggtcctccagttgaagtagggacttatagaggtcaggtaattaatggagttttagcccagattcaacttacagtgggtccagtgtgttcccagactcattgtgtggtcatttccccagtgccagaatgcataattggcatagacatacttagcagctggcagaacccccacattgcttctctgactggtagggtgaaggctattatggtggaaaggccgaatggaagacaatagagctgcctctacctagaaaaacagtgaatcaaaaacaatatcgcatccctggagggattgcagagattagtaccaccatcaaggaactgaacaatgcagggatggtaattcccaccacatccccattcaactctcctatttggcctgtgcagaagatagatggatcttggagaatgacagtggattattgtaagcttaaccaagtagtgactccaattgcagctactgtaccatatgtggtttcatcacttgagcaaattaaccatctcctggtacctggtatgtagccattgatttagcaaatgcctttttctccattcccgtacataaggcccaccagaagcaatttgcctttagctggtgaagccagcaatatacttttattatcctacctcaggggtatatcaactctctggctttgtgtcacaattttgtttggagagacgttgatcaattctccctggggcccagaacaggaaaaggttctgcaacaggtccaggctgctgcacaagctgctctgccacttgggccatatgacccagcagatctaatgtttcttgaggtgtcagtggcacatagggatgctctttggtccagagatatgtggatgtacctctctgagtggtcaaaaactgtgaagatatttgtatcccatgtaagtgctcaccaacaggtgacctcagcagattcccacagatttccccttcccaaaagatatgacactggttgattttgttgaggatattatgctgattggatccagtaagtgagaagtagcaaacacacttgacttattggtgagacatttgcatgccagaggacgggaaataaatctgactaaaattctgggatcttctgtgtcagtaaaatttctgtgggtccagtggtgtggggcctatcaagatattctttctaaggtgaaggataagttgctgcatttgacccctcctacaaccaagaaagaggcacaatacctagtgcgccaatttggattttggaggcaatacattcctcatttgagtgtgttactccagcccatttattgagtgactcaaaaggctgccagttttgagtggagtccagaacaggaaaaggctctgcaacaggtccaggctgttgtgcaagctgctctgccacttgggccatatgacccagcagatccagtgttgcttgagatgtcagtggcagacagggatgctgtttggatcctttggcaggcccccataagtgaatcacagtggaggcctccaggattttggagcaaggccctgccatcttctgctgataactactctccttttgagagacagctcttggcctgctactggactttggtggaaactgaacgtttgactatgggtcatcaagtcaccataccacctgaactgcctatcatgaactgggtgttttctgacctatccagccctaaaatgtgtcatccacagcagcattccatcataaaatagaaatggtatatacatgattgggcttgagcaggtcctgaaggcacaagtaagttacacgaggaagttgttcaaatgcccatggtctccactcctgacactctgccttctctccccgatcctgcactgatggcctcatggggagttccctatgatcagttgacagaggaagggaagactagggcctggttcacagatggttctgaacaacatgtaggcaccacccgaaagtggacagctgtggcaatgtagcccctctctaggacatccctgaaggacagtggtgaagggaaatcttcccagtgggcagaacttcaaccagtgcacctggctgtgcgctttgcatggaaggagaaatgaccagatgtgcgactgcatactgatatatgagctgcggccaatcgtttgactggatgatgagggacttggaagaagcatgattggaaaattggtgacaaagaaattcggggaagatgtatgtggatgtacctctctgagtggtcaaaaactgtaaagatatttgtatcctatgtgagtgctcaccaataggtgacctcaacagagaaggattttaataatcaatgttggataggatgacccattctgtgaacaccactcagcctctctccccagtcacctctgatatcacccaaagggaccatgaacaaagtggccatggtggcaggggtggaggttacatatgggctcagcaacacggacttccactcaccaagggtgacctggctacagccactgctgagttcccaatttgccagcagcagagaccaaaactgagccctcaatatggcaccattcctcggggtgatcagccagctacctggtggcagattcatattggacctcttccatcatgcaaagggcagaggtttgtcctcactggaatagacacttactcctgatataggtttgcctatcctgcactcaatgcttctgccaagactaccatccgtgaactcacagaatgccttatccaccatcatggtattccacacagcatcgccaccaagcaaggcaataatcttatggctaaagaagtgtaggcagtgggctcatgctcatggaattcactggtcttaccgtgttccccatcattctgacgcagctggattgatagaatggtgaaatggcctttcaaagttgcaattacaatgccaactaggtgcaatactttgcagggctggggcaaagttcttcacaaggctgtgtgttctctgaatcagtgtccaatatatagtattatgtttgagcatgtttacactcatactaagaaaatatcttcgttttatttcctttttcatgtaccataagatttattgacttcatatcagaatttaagtgttgttaactttatgtaatagcatttggattggggattggttcatttctagttttaagaaagatagctgtattatgttaggtataattatgatagtttatttgaagattatgtatgatctcaggagatttgtatgggttcaagttgacaaggggtggatgtgtgatggttaatactgagtgtcaacttgacttgattgaaagatgcaaaatgctggtcctgggtgtgtctgtgagggtgttgccaaaggagattaacagttgagtcagtgggctgggaaaggcagacccacccttaactgggtgggcaccatctaatcagcaggcagaaacaggtgaaaaagagagactggcctaggctgccagcctacgtctttctcccgggctggatactttctgccctcgaacattggactccaagttcttcagctttgggactcggactggcttccttcctcctcagcttgcagacagcctattatggaaccttgtgattgtgtgttaatactccttaataaactcctctttgtatgtacatctatcctgttagctctgttcctctagagaaccctgactagtacaggcagtgaggaatagctgatgtaggctgggaaattggggacctatgctgtgcagtatcaaaatatttggctaaactattgccggagataagttagaaggccaaagacagataattgtggttctagggaaattgttggaaggagccaaaatattagtgtgtgttggctacacagactgcatttagcaaaatatttcaggaaaaagattagcttatatatgactgaccaactggtagcagggctggaaaaagagaactcttgaagcccacatagcatttgctctccagagattgttaagactttccagaataaaaagaatttagccatgtgataaaggtcaggttaaaggcattgttttctcacacaagtgtattgttttaagtggtttttatttagtggccactaaatttgaagaaatagccatgagggaaagacagcaaaattacaaggcagatgtaagaactatgtctaggaaaaaattcagggtatgactccagtcataataaactaactagaagcaaatattcctgaaaattttgaaagggctgtgccaagaaagaatgcatgattctaggctgtaaaatccagagaccaatgggcaagccttaacacttggacccccaaaattgaatgaataagtagtcagctatgaaagctgatcagttctcaaagggtcagagtttctgacatccactgcaaataatgatgtcatgaaggattgaacaaggagaaacaatctagaggtaatactcagggtcatgaagaacaaagggcaagataatttttctataaaaagactgcctaatccataatatattatagggatattttaatgcctgttcagcagaatatgacaaaggagtagtgactactgtgagatttttaacatatattctacccttctaccatcatatttggtgtggaggaaggcaggggcaaatagcttgtcattttgattagcaggtcactggacaggtagaagtcatatctggtctatggaagcaaatgtacaactcccacagatcatggattttgagctgatgcagtttcttaatcaaaatctggaattttcctcttagtgatgggataggtgtggtttccaagtgggaagaaaggtgcaattttcccacccaaagaactaagagtgaatttggcagtcagagaaatggacggtagaagtatcaatgtctccactaaccttgctagtcacttgtagctgggaagcagctacccagttaagaagtgcatttatttactctgcttgcgttcagatgtgatcttgtgattagttgtcaacaaagttaggtgaacagaaaagatgtgagccacttccaggcaaaggatgtaattaattggtttgcttttgtccattccacttccccttgtactcatggatgccaatatgatgaaaggtggagccacaatccagaagactgggactctgagtcacccatggaaaagagtcaccttgaattgtgtgggctagaaataaactttcattgcatttgaagcatgtagatcattttgtttctatttgttaccacagtttagtataatcttccacattatagttatattagtaagagataatatttattcagggaaaagcacaatgttaacaaagtcattttaagtgttcttgtaagaagaaaaatatggatatggaatacactgcaatatatgatgcatatctaaggcatttttgcatttgaaatctgaggtgaaaactcctttcatgtaacttggctagtttttgttatgtaatattaacagactatgcacatatatatgtgtatatatatatatatgcatataaatatatatatgtgtgtgtataatttgtttaaaaatgaatcttctactaatataaatgaagaaaaacataaaagtagataatcttatttataatgtaatatgtgaatttcagctttgcatttttgattgagttttatttgctctttgacaaaaattgagcagccatcagatatgtgatggggaaaatatacaaacaaagctatgacttatataactcgtgccttgaaaatcaagtaaaagaagccacagtgcagttttaggacaacaaatgagtcaggaatcaaaagttctaaactctggtttagcgtctacttgctaacaatggattggttctcagacatcaatttttccctatttccatttagagagagagaaagctaaaatgtacatttctcagactccctcacagctatggttttggacataagattctgccaagcacaatttagaaattataatgagaaggaagtcaccttcctatgattactgtactaatgttttcagtgttctaacctcaagttctactttgtagtcaccaactgcgtacagtagcaaaaacatgttcctgaagagtagtatgaacttctgctcttccagacatccctacaatttttgaagtacctaattccctgaattaagtttcattctatttgaagcatctaaagcggctcttttttcctgtactgaacattgagtgactcactaataatgagtgattaataaactctttgagctcaactgatcatagataaacattaataggtagtatttcaactgagaaacagttgaggactatggccaagtttatagtttccaaagcactaaaaagaaaaaaaaaaaagaaaatttatacaaaaatcagaaaatgaagaaaggaaaaactataaaataaaatggcagaatgacaagggtaaataatattaaaataaaccagaatggcctgattgtattcatttaaataaaggaataagaaagtacgtctttctctcttttcctttagaaaccccactaaaacaagaaatgtgttcaaagtggaattttaaaatagtataaacctggaaaagtgaaaataacgagaggggtttataaataaatcagagatgtcaacaaatatgtgaaagtcataaggtgtaaagaagtgagtaaacaaatgaaggaagaagaaataatcacatcttcgaatatcagtgctacagagccagtgcaagtctgtctccctagtggaatgtctgaagcacggggctcacagttggcaagaaagggagagaaaaagactgagaagtgaggttaaaacagatttttagcacgttctgcaaatatgtttaagtacattttgcttgttctctgtatcttccagaatgtttaaagtagtccaacattttttaaatttaatgccaaacattggagaaaggagagagaaaatggtaaatatatgtgaaccacatagtccacatcaggaattaacaactattttgcactttactaaagtaaataatccagaattataggagtttacatatgagaacggacgcactgaatctggacttagaggaagattcatttttctggcagattctgagttgtttactacatgtaagttttatatccttggggatggagttggtgaatgccttggaaggcaacaacaaatcaagagttggaagatacatattttttaaagagagagctcctataatttataattttatgaatggctcaatcttccttcttagcatgtctagttctgatggatctatttgttattcctgtacattcctatcctgtgcctctaggccttttggcatcaataagcaggtgtagctcctgctgcaacaatcagagaagaaataagcttaggacaaattactaacaaatttttactaatactaactggcaattgtgacataggccttaccacatatctcattagggctctaacacttgcagacaaacccttttacatagttaaccaattttcacatataaaattcatgtctttttctgtaaacattgggaaacttaggcactagtttttagatgcaattgaaatacaaaaagccaaagcacttcagcagtgtaaagaactctgaaaatccattcctccataagagctaagagaacactagctgaattgttcaaaatcaacatttttataactctggaagttaaccaaaggcttgcaataattagtggattgaaaaaacacacaaacaaacaaacaaaaaaacgaatctcagtaagaagagtgaggtttgtggtatttctaatttcccctgttcccatccctgctcctctgtacctcggcaacagccttgaaaaccagcagccttacaaccatggtagctgtaagaaccagcagtctaacagccactgaaggaagaatgcgtttggagctccaaaaaccagatcttgagagaaatgttattttttgacctgtctggcaccattcatagggggctcatctttacatgaagtaagtcagagcttactcactaggaaaatcccttccccaggtcatttatcaaaaatttcacagagaattatatattacttcagctgcctgaggtgttaatatcatttggggtaagcaagagtctggccaaaaaacttaacaagaaaacttggagatgatatgtccactgagctgtgaaaagctctgtcacgttcttgggaatctgaagatcatatacatgtacagggctgtacaatactcagaaaagaactgagaaagttctaacctctcatttctagttaattttgatactttatccaagcaggaagtaatggctgaagcacaaatgtgaactctcagagcattaaagacatgcccaacacacaaacaaagcccctcaggagagtttaggggactagttggctcaaaaaatctaaggaaatgaatcattagttgatcactcagttaaatgagcagtgacttcagtgattgcacatgaccaagaatacagactttagagaattatttcatgaaaaacctgaaaggaacaaatagcaacagcaaaaacaaaactaggggaaggaggagatctgattaccaaagctaacacatgatataattttaagtatccagtttttaacaagtaattataagacatccaaagaaacaggaatgtattatcgtacatgagaaaaaaagcattcaatagaaactgttcctgaggaagcccagatgttggatttattagacacatacagtagctattcgaaatgtgctcaaagaactgaagaaaatcttgtggaaagaatgaaaataaagttagaaaaattcctcactcaatatcaataaagagagagaaattatttttaaaaaagaatcaatagaaattctgaagttgacaaacaatttttatttttactacaggggctttatagcacatttaagttatcaaaagaagaacaaataaccttgtaaacaagtccattgagattatcctgtctgaggaacagaaaaaaataacaagatctctgggattggagtttcaggaggaaagcataaagagaaagagatagaaaaaaattttgaaaaaatacaggcaaaaactttcaaactttgatttaaaaaacactaacttacacatccaagaagatcaacaacttccaagtaggattaactcaaaaagatccaagtgtagacacattataatcagagtggcaaaagctgaaaacaaagagggtgttgaaagcagcaagaaaaaagagtattataaggtacaaaggaatctcaataaaattaacaggtgactttcaacagaaatcatggaggttataaggcagtaaaacaacatattcaaagtgcttaaagcaaaagaatgtcaaccaagaattgaatatccagcaaaactaaccttcaaaaattaaagagagattaagatatccccaggccaaaaaaaaaaaaaaagaaaaaaagaaaaaaaaggaaatttgtaactaacagacctatactaccataaatactgaagcaactccttcagaatcaaatgaaaagaagttagacagtaattcaaatccacatgaacatttttcaggcctggaaataggcacctgaaaaggctttacctggcaggcctcatggggaaatctactctccccacaccaaacttgacatacagaccgtgcattgaagtctctggcaaaagttgcagccaagaactcaggcctctctggctggtcatgctcttatgtgcattttattcatagccaaaggacctctattaggaagtctccttattgggaagcctcagctgagagattcctcaagcacctctatatttttataatgggatcgcaaagataatttttccactctgacccagtacttaggactctttgaattttagcccttacccttccactttccctagccccaggtcataaaatgacagaagtcctttattcaaggctctcttggcagttacatattttctccatctgtattgctacatttgaccctcacacactgccattccatgggggaaatgagaacattgagggagccagcatgccagcactctttgctatttagcctcttatactatcacagtaagtgaaaaacagctcaattattatttatagcttagtttattgtcttaatgaatgtcaacacccagcagctcagctttcttcaaaagaataaagagcactagctggtgcagtggctcatgcctgtaatcccagcactttgagaggccgaggtgggtggatcatgaggtgggtggatcacgaggtcaggagctcaagaccagcctggccaatatggtgaaaccccgtctctaataaaaatacaaaaattagtcaggcgtggtgatgtgcacctgtagtctcagctgctcgggaggctgaggcaggagaatcgcttgaacctgggaggtggaagttgtagtgagctgagattgtgccattgcactccagcctgggtgacagaatcagaccctatctcaaaagaaaaaaaaaaaacaaaaaaacaaaaaaaaacggagcactagtaaaagtaactacacaggtaaatataacagatgtaataaatgtattttttgtttctaacacttttctttccctatctgatttaaagggcaaatacataaagcaataatcatgaatatgtgttcattggccttaatgcataaaggtgtaattcatatgaaaacaatagcaagaagaattgtaagggaacaaagctatattacagtaaaatttttgtataccactgaaagttggtatgcattaatttaaaatagattgttgacattaatttaaaattgacagtaatttaaaatacattgtcttagttaagatgtaaattttaagcccagggcaaccattaagaaaataatgcaaaaaaatataacaaaagtaacaaaaggaattaaaatagtgtaatacaaatatatagttaacacaaacaaagcagtaattgagtaatggaggaacaaaaaacattatatatatgttatatgtttaaatatatatttatatacatatatatatcccaagaccaaaaataaataaattaaagaagaaatacatcactaatagacctatactacatgaaatactgaagcaagtccttcagaatcaaatgaaaggaaactagtcaacaactcaaatccacatgaacataaggagtccagctccaggccaaaatcatatatgtgattttttaggcctaaaaataggcacctgcatatatatatatatatatacacatacatgtatatgcatgatataaatccaactaggcaccaaataaatccaaaataggcacctacctatatatagatatatatatatatgtgtgtatatatatatatatgcagatataaatccaactttatctatattgcattaaacaaaagtatactaaactctcaaacaagtggcagagattggcagaatgaattagaaatctgatccaactatatgttgtctgtaagaaatacactcaagattcaaaaataggtaggtggaaagttaaaaagatggaaaaattatatcataaaaatagcaatcaaaagacaactgaaatggtgatactaatatcaagcaaaatagactttaagaaaaatattattattagaaaaaatagaactatgttttataatgataaaagggtcaaccattcaggaagacataacaattataaacatatatgcatctaacaagagagtcccaaaatacgtggagccaaaactgacaatactacagggagacatagccatgtcaaaaagaataatgggacacttctatagcctcgattgcaataatgaataaaaataagctaagaagaatttcaacaaggaattaaaggagatttaacaaatctataagccaactagagctaacagatttttatggaacactctacacacagcagaagaatccacattcttctaaagtacacaggtaatattctctaagataaactatatattacttcattaaaaccacaaaaaattaaaaagttgaaaatatacaaagtatgttcttcaacattaaagaaattaaattataaagggataacaaaaggaattttgggaatttacaaatatgtagaaattaaacaacatgctcctagccaatgggtcaaagaagacatgataaggaaaattacaaaatactttgagataaaatatttatagaattctattacgtttctgcacattgtgacagtacacggatcaaattcttttttctctggactatttttcttacaatttgtacagaaaacatccttggaaagcagcaaaaatgttatttattgtcatcagttacacaccattatgtgactgtgactataaaaagtgaggagaacaattttctatattataaaaatactaattgtaaaatggttacatctttctaatatgtattagtggtatcatagattttttgaaatagaatttctgtggaaaataatactatctagaagatgtagcatttattggattctgctcatttttattcataaattagacttttgctaccttaaattgttcttaatagtctaggtgctaatgtatgcttgttgttagtgtaaatcattgcaggcctcagctaatcaaatgttttatatgattttttcactacttttggcttcaaagagaagaaaaatttcagtttataaaatctgccaaggaattaactggaaccaagaacttgattaagtataaaagaaggcaaaaataggggagagtgatcaaaacaataaagcaattgcttctaaaagaaaatctctggtactttggattaactgagcaaatttacccagaaataagctcaaggtaatcacagacttttatatattcaagtgtgcataaatataacattttatatattcaagtgtacataaatacaacattcataaatttttcccaggaaagagtatataatgtgcacctccaatttcatgtcaaatctttatcacatttaatagtaaattttatctcaaaaataaatgttgaaaaaatcagtcaagctacacattttttaaattaagaaataaactttcatttgaataaaaatagttatgacaccattggattaactaataagtaataattaaagccatatttctaggtctttacagtctacatttctgggaacttctgatattttaaaagtaatttaagaggtctgatatggtttggctatgtgtgcccacccaaatttcatctcaaattgtaatctccagggctggacctggtgagaggtgactggattataagggcagttttcttatgctgttctcatgatagcaagtgagttctcgtgagatgtgatggttttataaggggctcttcccctttgcttgtttgctcactgtcacctgccgccatgtaagacttgtctttgcttttttcttgctttctgccatgattatatgtttcctgaggcctccccagccatgtggaactgtgggtaaattaaacctatttcctttattaactaccagtctcaggtaggtctttatagcagtgtgagaagagactaatactataaattggtactggtagagtggggtgctgctgtaaagatacctgaaaatgtggaagcaactttgaaactgggttaacaggcagaggttggaacagtctgaagagctcggaagaagacaagaatttgtgggaaagtttggaacttcctagatacttgctgaatggttttaaccaaaatgctgatagtgatacatggacaatgaagtctaggctgaggttgcctcagatggaaatgaggaactccttggaaactggagcaaaggtgacccttgctatgctttagcaaacagactgtcagcagtttgctgctgccctagagatctgtggaactttgaacttgagacagattatctgaaattggaacttatatttaaagagaaagtaaagcataaaagtttggcaaatgtgcaacctgaccatgcaatagaaaagcaaaacctattttctggggagaaattcaaactggttgcaaaaatttgcgtaagtaaccaggagccaaaagttgatagccaagacaatgaaaaatatgtctccagggcatgccagagaacatcacagcagcgccttccatcacaggcctggaggcctaagaggaaaaaattgtttcttgggggtaggcccagggccccactgccactctgagcagccttggaacttggctgtctgtgtcccagccattgccacaccagctccagccatgactaaatagggggatcatagaactcaggccattgcttcagagggtgcaagccccaagcctcagaagcttctatgtggtgttgggcctgcaggtaaaaaaaacacaagaattgaggtttgggaacctctgcctaaatttgaggatatatggaaacgcctggatgtccaggcagttttctgcaggagtggagccctcatggagaatctctgctaggacagtgcataagggaaatgtggggttggagaccccacacagagttctcactgcagcactgcctagtggagctgtgagaagagagccacctccttccagaccccagaatggtagatctaccgacagcttgcactgtgagcttggaaaagccacagacactccatgacagcccatgaaagcagccgggtgggaggatgactgtgccctgcaaagccacaggggcagagctatctcagaccatgggaacccacctcttgcatcagcatgacctggatgtgagacatgaagtcaaagcagatcaatttaagctttaagatttaattactgccttgcctggtttcagacttacatgaggcctataatccctttgttttggccaatttctcccatttggaataggaacatttagccaatgcctgtaccccattgtgtcttggaagtaactaacttgttttttattttacaggctcataggtggaagggacttgccttgactcagatgagactttggactgtggacttttgagttaatgctgaaatgggttaagactttgggggactggtggggaggcatgattggttttgaaatgtgaggacaggagatttgggaggggccggggtggaatgatatggtttggctctgtgtccccaccaaattctcatctcaagttataatccccacaatccccatgtgtcaagggcaggacctggtaggaggtgactagatcaggggaatgatttcccccgtgctgttctcatgatagtgagtgggttctcatgagatctgatgatgttataaggggctcatccctcttcgcttgttcacactttctctcccctgcctccatgtcagatgtgcctttgcttctctcttgctttctgctatgattgtaagtttcctgaggcctccctccccagccatgcagaactgtgagtaaattaaacctctgttctttataaattacccagtctcggatatgtctttatagcagtatgagaagagactaatacaaggtctgaatatgccttctaaatttaatagacataatcatcataattacatggttttaatttaacatatgcattttattggctaaacaggtgcacagtttatgctgggcccctccacaaaaaccattcttccattttctttggctacaaaggtcatttcctttaaataacccatctgacttctaaatccaagttacatgtcttgtgatataggcattctgtacatcaaagcacttactatggtatctttggttttatgtttattcatcattataccccataaaaattggaaacttcatgaaggtgcaacccacatatgtcactgatcttactcttgaacaaagaacacaaaagtagaaaatggaggaatgaaataaaaatcgcagagatgtgcaaaaagaggagtgttcaataattaatccacacatagataaattctttatactcaataaatatgatgaatgtaaatatgatatactcaataaatatgatgaatgtaatgaatgcattatactcccagaatgcaccattttctaggtactagatgatacagcagtaaataaaacacaaaatttctgccatctagctgcatacattttagaatctagatggttgttacctgagatatatcataatatatttttaccaaaagaagcaatgtaaaataatgttataataatataatatattatatatatatatataaaatataatataatcatctaaaaatgtgaggacactgggcacatatgcagtatgatgaaataggagaaatgcaggaccaagcaaatagacacatgaaataggtcatcagtagtttcaggatgtcttgtagattcatttatttgttcattatactcaaatactaatttgacaatttatataagcatcctactaaagactaagtattgagtcctgaacaaacagacatgactctgtgctcatagcattctgatttatttttaactattgcgttttaaccactgccttggtctgaatgtttttgttccctctaaagacgtacgttgaaacttagcctccaatgcaacaaaattgagagatggagcttaatagaaggtgtttaggtcagaataggtctgccctcatgaattaattaatgctgctatggaaaggtcttgtgaaagtccattctgcctcttttgctattttgccatgtgaagaatagcatttgtctcccttttttgcctttcttcttctgccatgaaaagtcacagcaagaagtctctcatcaaatgcctgtctcttgatcttggactttccagcctccagaaatgcgagaaaaaattttctggtttttgtaaattatcaagtcacaggtattttgttgtaacagtactaaatggacttagacaaccacatattaccgtaagttacactgactttttaaaactaaacttcttattaaaaaaaaattacagattgatatgcagttgacaataataatagaaacaccccatgcaccctttgtccatattcctgagtaacatcttgcaaaactgtagttcaatatcataaccataatatgacattgacacaattaagataccaaatattgtctttaccacaatgatttttcatggtgcctcttgataaccacacctacttccctctgccatttggtaactcatgaaaatcactaatctgttctccgttgttataaattttactatttcaaaaatattatgtgtgtactacactagtatgtagccattttggattgattttgcatatgtggagattctcttatccataaaaatttccttttttcttactgctttcaaaattctttgtttttgacttcttacaatctgattgttatgtgtctctgtggacttttttggttcacctatttagggtcttcttatagccctggatatagattatcattttcttcctcagatttgagaagttttcagccactattttgaatacgctttctgatctttctcctctctttttctgaggactttcataatgcatacatttagatgatgttctttaaatctttcaaacttgtttcaccatatttcattgttttacttttgttcctctcactaaataatatccaattatctgtcttcagatttgctaagcctttattctgtttgaaatagtctgtggttgaactgctctagtgacttttaccattcagttattatattcttcaactccatgatttctgtcggaactcttttatattttacatctctttattgaaattttcactttattaatgcattgttctctcaatctcagtgggcatctttattattgtttttaaattaattctatgtcatacaaattcttttttatggggtgggggaagatcacttgggattttctatatagaccatcatgtaatttgcaaataaggaccattttatttattcttttcctatctgcatgcctattatttgctttgcttgttttactgtgttagctagattttccagcactatgtgggatactggtggtgacagtgaacatccttgtcagtttctaatcttagatgtaaaaaaatgtagtattttaccattaagtatgatgttgtatataagctatttgtagatatcctttagcaagtgtagagtttccctctattgttatatttctgaaagttattatgagcgggtgttgcattttatcaaaatgcttttgctgtattaatgaatatgatcttgtgatttttctccttttgagtgttaacacagtggattacattggctgtcaaatactgaagtagcctcaaatcactggaataaatcccatgtgatcatgatgtatattttttctacattactgaattctatttaataatattttaataaagtttatcacatgtctatattcgtgacagacattggtctgtaattttcttttttgtttctttcttagtttttggtatcagggtaatataaacatcaaaaaagaattgggaactgtaaacttattttttctggaagagattacataaaattggtgttagctattcaaagatttagtacaattatatgggtaaccatttgtgcctggagatttctttttagtagtttttcaaatttgacttagttacaatttaattttattaacaattatagggctattcaaatttatctactacatattgggtgagttgtcacattttgtgctttttgaaaaactggtcgatttttatcaaagttaacaaacatgtttggggagttcttgatagtattttcttattatccttttgagctcggtaatggctgtagtggtatcactcccaatattggcaacttgtgacctcttttttagtcagtttttatgcttttaaattttacttatttttcaaggaactaattctttgcttattttgaattttttattgcttttctattttcaaattcattgatttaaactattatctttaatattttcttccttctgcttgctttggatttattttgttcttaaattactgaggtcagagattagatgattaatttggaactttccttattttctaacgtatacatttagtgctagaaatttccttttggggtcgggtgtagtggcttatgcatgtaaacctagcatgttaggagaccaagacgggaggatcacttgaggccagaaatttgaaaccagcctggacactatagtgacaccctgtctctacaaaatattttttcattagctgcacatggttgcatgcagctctagtccaagctttttgaggggctgaggcaggaggagcccttgagacctgaatggtgaggctgcagtgagccatgatcatgccactgcactccagcctgggtgaaagagtgacatggtctaaaaaaaaggaaaaaaaaaaaaccctcttggaactaattttgctgtgtcctgaaaaactttatatgtttatatattcatttataattcattgaatgtcttttttattttacttgaaacttcctctttaacccagggattatttagaaatgcattatttcatttcaaagtgtttggagatcctcctattaactttctgatactggtttccagtttgatcccattgtgattacagaacactccttatatgatttcaatttgcaaaaactgtgtctaggtctgctttatagcccaaatatggtctatcttggtatactttccatgggtacttagaagaaatgtttattttgctctttggggagtaaaatgttccttaaatgttgattagatacttatagctggtggtgttgagttcttgtatatctttactgattttctgtctaaatagcctattgattattgatagaaagatgctgaaatctccaacaaagctatgatctttgtctttttctcctgtctttttaattacatcagcttttgtttcacatatcttgtacctctattgtttgacatgtacacatttaggattggtgtctttttggtgtataaactttttatcattatgtaatgtatttctctgtctctggtaattttctttgttctgaagtctccttaattttacaataatctagccactcctgcttttttaaattaatatttgcatggcatatcttttccatccttttacttttaatttatttatattgtattcgaagtgagtttttatagcatatagctcagtcatatatttttaatccaccctataaatctttgtcttttcatgtgtgtatttatttacttttaatgtcactgttaacatgctggcatttaaatctaccatttaagttttattttgctccctctcttttctctttgttctgtttcctgttttcttttttcctgcctttttatgagcaatgtgacaattattttagaattttattttgatgcatatactataatttttacatatctcttgttatagcatttttagtggttgctcaaggtattatagtacaaaacttattatagtctactgatgttgacattttaccaattaaagtgaagcgttaaagctttcctctcatcacatcttttttcctctttcatttataaaataattgtctttaatattgttctaagcaattagaatcacatcagtgtaataatttttgcctcaactgtcaatcatgacttagaaaacccaagaaaagaagaaaatatgagtaagtcttttacttatccatatttttgctgtttcttgttgtttctttctgatattccaaaatttctttttttatcatttcatttctgtttagtgaatgataaattctgacccaattttgaagtgaattctcactgaattatgtcccctcaaaatttatatataaaattggtgattgaggtcctaatcaccaatgtgaccgtatttgaagacaggacctattaggaggtaattaaggttaaataaagttacaaagttagggcacttttacaataggattagcgtgcttttaagaagatagactagaaagctgtctctctgtctctcccgccctctctgtctctgtctctctctctttctgcacacacacacacacacacacacacacacaaagagatcatgtgaacacacaacaatatggcagctgcctacaagaaggaaagagaaacctcaccagaaaccaaccatgctggtgtctttgtccgagacccctagcctccaaaactgtgagaaaatatgtctgttgtttaagccatccagactatggtatattaatagcctatgctaactaacatggataatttcctttagtcattcttttagaatatatctgccggtgataaattctcttagctttccttcttcagagaatgtcatcatttagctttgattcttaatagaaatgtaaatggtatttagaattttgagctgacagttttctttcagcacttaaaaaaatgctgacgcactgatttctgattgaaaagttaatatcattcaaattgttttactcctatagccaaaatgtcatttctccccagttgcttctatcatttgtatttgcctttagtttttacaagtttgagtatgatatatcttcatgcagacttttctgggtttatattgtatgggttttttctcagcttcttgaatctgtaggtttatgtattttgccagatttgggaagtttttggtcatttttttgtgtattttttttacccctcccttctttgttctttccttctggaactctaatcctgtttacttatccatccttctatcctcattattctgctgttgaactaatccactgagttttctattttggttagtgtattttttagctttaaaattttcatctcgctcttattttatcttctatttctttactaagacttttctcttttaatttatttccagtttatttgtaattactttcagaagcatttttataatgatttgtcacataattccagtatctacattgtattggtgttgacatctcttgatttctttcttcattcagttagaagtattcctggccattttgtgacatgtgatattctgttaaaacctgaaccctttggaactatgagactggatcctatgtaaacctactcagttggtttcctctacagggacagaaggcaagtgaggatagaatttcaagttccctacttatcctctattaatagtcaaagaggagaaaagctccttgttactgttgggcaagtgagggattttcatgcccccactagacatttgctgatatcatatgggcgtgcttttgttattgctccccatgtggcctccactgacaccatagggaggggaaaatgggcaatgatgaaagtacagactctcctctaggccttttctaccaccaccagaaagagcattcttctttattaccaggtgggagtgaaaagcaaagctcctcaggtggtattcactgacacaataggagccacaagtgtgactcattatccttagcagagaacaaagttacaccttcctactcagtcttctctgacatcaccctagagagagtttgagacacctctttatagcttaaaaagaatgaaaatctatgctcctcatttagcttttgccagctaaggtggaagtggactacagatttttttctgtgatatttggtcagggtggaagagttattatatagaagttttctttcttgctagtatgtgtctttcctgaaactttgactagagccagtaggcttttgttaaggatttttgtttttgcatcctttggcatttctgggattttccagcttctgtagctccacgtcggaaatacgtgaggcaaagagaaaacatagaaaacctaccaccatgtcattctttggtcctcaagttccttagctagttttcctacttctttacacttttcaggtcttcctaggtttgttttacatataattttcaaggttttcagttggatttagcaggaatatatctactccatctttctggaagcaaaataccattaagagatactgattttagaaatggaaatgactcatgtgagagaacacaaaatggaataattttactgagacaagaaggatcaaaccacagagaagatgaagactaaatcagcatgagctaaggtggttacagaggataaagttacctgactgttataatcaagattctggagcccagggagggcaaaaccatgtgattagtagcccttcccaaattccattatcagtgggaacagtcaaattcctggtggccacttccttagtactggctttttacccacaagatttaatactaagttgattgattcaactgtgttttctttgcctgtttcatgagctgctcactttaattctggatgttcgactagtaaaaaagatccatttctgtaattttgaaaatatggaaatatgtgaagtcaaagtcaatctcaaaccttctttgtagagatggtaagtaaaattaaaggattgaaaacccattactgtgctacaaatctacttaaaatttcttaatcattgctgtttctgagctcctctgaataatctcttaatgtgtggtaccctggctcatggcaaggacatgacttaaattacatgcaaaaatatcttaaaagtatttattcaggtaatagatactccctttgtgatgagaaacagatttaatacaatgatgacttgttcccaaacaataatctgagtatcagaaattgaagcttaagttattcctaagttttattcctaaaacggattttttttgtttttcagaagaaactagaacatattaataaacaatttcacacccaaaggaatgtgaaacttcattttcctgacaaagaatgtccactaattaaaaatgactgtgttggcaatttaaaagtatctctttgcatattgaacacttgctttgggtaagaacttggcaaactaaaagcatatggccattctctttttcatggttgtacccaataaatgtcatcagaatttcaaaatgatgaagaaggtctttaagtagagaaaatgaaatgccacttttggttttctaaatgacagagatttgagggaggggctctgaggcacatacgcagagaccattaagtgatatagggaccagaaatacagagccaaattctatacaataaagaccaaatatcaaaaatagtttacaatactaaaacaggttatgtctaatgccaagaaatgctttcagtaatactagtaattttttatgcctctaatcataattcataagactgaattaaagtagacaaccctacatttaatttgtcctttgagcaatattatgtggtttcaaaaccatagctataagaagaagaaattcatttgctgtttcccttagtgtattattcaagttcagtccattactaaccactttcaatttttaaataccagcatgtcttcattgtaggagtactggactaagagtaacaagctgcaaatctgagttcttaactaccactgacatcacaatgcattacattttttctgaatctcactttccttatttgtaaattaaaatagtaatggtagctgctctgagtgcctcacagggtagctctaaggaacaaaagaaagaaaatctttataaagtagaattcataccaaagtggtaattaaacccttaaacagcaaaactccaagtggatgtacctggagactgaactagcacaaaagagcaagaggagacatttgttagtgcaaatgaaggggaataatatgtgaaaagatacctgtattacaggtaaatttcctcaggaagcattcaacttggaagatgttcttattaaaacacccagggtcatcttggtatgtgcatgtgcatgcatgcacatgcacatacacactcatgcaaacacagatacacacacacactggtctgcatttattgaatgctaattaaataccaactgaatgtcggctctgtgtttgtcactgtgctcagaactagtgatagaggagtaagtaattgagaaacagtccctcctttcacagagcatatgttctggtaaggaagattacaatatcgtttccaagtgtgcaatgacaacatgatatgttgtagaaatgagaactatggtggtatgaatatttattattgagacatgaacatatttgtgtctacattaactgatattttaaatttccataccccatttccatactattataaaatgtttaatagtaattaacttgatatttcaatatttaagctccaggatatatcaggggaaattcagccagatatcgggcaaaattcacccgatatttcacataggttcttttctattttccctaagcgttggctggtttgagaaataaagggactgagtacaaaagagagaaattctaaagctgggcatccggggggagacatcacatgtcggtagtttccatgatgccccacaagccgcaaaaccagcaagtttttattagggactttcaaaaggggagggagtgtacgaatagggtgtgggtcacagagatcacgtgcttcacaaggtaatagaatatcacgaggcaaatggaggcagggcaagatcacaggaccacaggaccggggcaaaattaaaattgctaatgaagtttcaggcaccattgtcactgataacctcttatcaggagacagggtttgagagcaaccagtctgaccaaaatttattaggtgggaatttcctgtttctaataagcctgggagacctgtgggagactggggtttatttcatccctacagtttcgaccatagaagacggccacacccaagggggctatttcagagacctaccctcaggggtacattctctttctcagggatgttccttgctgagaaaaagaattcagcaacatttctcccatttgcttttgaaagaagagaaatatggctctgttctgcctggctcaccggcagtcagagtttaaagttatctctcttattccctgaacattgctgttatgctgttcttttttcaaggtgcccagatttcatattgttcgaacacacatgctctacaatttgtgcagttaacgcaattatcacagggtcctgaggcaacatacatcctcttcagctgacaggattaagagattaaagtaaagacaggcataggaaatcacaagggtattgactggggaagtgttaagtgtccatgaaatcttcacaatttgtgtttagagactgcagtaaagacaggcataagaaattataaaagtattaatttggggaactaataaatgtccatgaaatcttcacaatctatgttcttctgccatggcttcagctggtccctctgttttggatccctgacttcccgcaacaaggatatccaggaggaaatgtgtctcagctagaaaaggaaacagcattacccaaagatggccaaaaggacttggtgttctcttgtggtgagatggttagttagtgtctgttcagttattaggcagaaacatgattttgctgtctttatttggaagtcgaaaggcttgtatatgaatatcaggttgacaaggggcagactgtgacagcttcgtacaacatcaacttagttaagccaaaactaggtcttctgtaattctgttttctatgtttttctgcgttagggtgagccaaaagagaaaccgcacaagattggaatggtagatgtgaaacaatggctataatctctaaaggtcattgtagggtaccaggttcccctgtagctcacacacattgttactgagccgctaggcatgtggaagcagccagatctacagctttttcagatcctgctagagcttcaggtttaattgttgctcccaggtacagagtagctagctcttcctaacacagaacactcatatcatcaagattggaggaggtaagattcagacagtgtttccaatttttccttatggattccagtttgtccttgctgtgtctcctattccatgtctaactttttttctgaactaccagccctgactatctatagcaacttcagacccacggccagatacagtgacaacagccttctgtagacttctttgccagctcccacaattatatatgttctgattccaataatgttctttcttctgtggtgattatgctttctgattgaactctaactgatacaatatgctgcagcaaaattagggggaaatatcaaaaagaaaggcaacatcatgcagtgagccgagattgcgccactgcacttgagcctggtgtcagagtgagactccatctcaaaaaaaaaaaaaaaaaaggcaacatcagagcacaaaaacaacgaattaaataacataagaaaatctggaattattgacctaggatgattgcttctgaaatcagaaagccaccagttcagctaaattagaaggacgtggactttagaacgaaggtctccaggcaaaaggactggagatttgagattaagtccacataaagaatgggttacatgacagaaagaagagacaaaatcaaggatattatcaaaacctgaaagaaaataaaagaaatcaatcatgaacttcaggtaaaacaagcatctgcataagcaattatggtccgcatatcaagttattccttcaaattagaataggaagccagtaaacttctagaggaaaaatagactggattttaggcaatagaatgagtaaaaagatagacgatactggatacataacaaagaaaacatatgtttccttttctaacaagaaaaacaaatcaaaataaaagcacttagaaactctacaaagaaccaagaaaagaaaaatggtaaaaacatgaaggaagttaaaatgggtcatgattttgagaacttggaggagagtaataaaggagaatggatttgatcttcatccaatgaatgtcaatggggttgtctcagtggtgctatagaacaggagacgtaattccgtcatccactgggcattgttgtcaaggatatttacatggccataccaacttaattgtaatttattgttttcaactttcagactcagactgcataatgcctagaagaccaaataattaacataaaacagaatattaatggaatcaacactgagaaaattaactgagtcgcagaaaaaagaacaaggacatcatttgatgtgcttcacttgttacaaacttgagaaaaaaagcatctcaataaaatatagtatgatgctttgctgagttaagtgtgagctagagttagtaaaatcatcctgtttaattatgctgtacactataaaaacaatttagcatagaacataaaacattgcttttctgtgtttcttgaaaacctgttatttctctgaacttgagtcagagaatcttatgaagtgaatgactgtgtgccccccaaattcgtgtgttgaagctctaatccctagtatggctgtatttagagatggagtctctaaagaaatatttagggtcaaatgtggtcataagggtgggtccctaatccaatatggctgacttccttatgagaagatatgctagggagctctccatgtaccaaggaaaagccatgtgagggcacagcaagaaggggccatctacaaaccagaaagagagcctcaccagaaactaaatcagccagaaccttgatgtgggccttctagcctccagaacaatgaaaaaatacttttttgttgtttaagccatctagtctacagtattttgttatgccagccaagctgactaaggcagagaccaatggtggggttaaagaagaggtgaagagaagctaaatgcctcgtgtttctagttcaatcatattagcttcatgtttatttgttttataattgttgtttattgtatttgatatcagattttccccgacaaaagaaaaaagagttctaaatcatcaactagcacccctgaagaaacagaatgtcaaaagcatctaaatactaaataatttatgtttcctactcaaatattactgattttccttcatgccaccatttttatgcattgtttgacattttattttaaaataaattttaaactcacaggaaggtttttaaatagttacataaaactcacactcatagctatattcaacaactatcaacattttgccaaaatttctcacacatactctatttctattcctcttctcccttccctctctctttacacatataaaataatatagacacagaaatctaaatctttgggattaaatgcagatatcgtacttccatatctcctaaatacttaaacatgtattacagcaaaacaaaggcattctctctttaatcaccttcacaacattttttgaactttcttttttctttctgtacttcttgcccataacttatcttgattgcatttggttacttttttcatattcataaatacatactagtattctgaatgagataagctaggtagaaaggggaaagactgttgtttctagaagaaactgttgaattcagttgccatggtgggattatgaaaacggttttgataaaaattcaagcagaaataaacatgcatgatcttctccatttagaattgtacaaaaagccatgtatactgtctgctttgagatgaaacaatagtcttgtgcattgtcatgtcaaacacaaataactctttattctattttgtttttcttgttttgccttgtagtcctgcatgaaagatatccaaaaactgatcttcactgaaaaacaacactaaaatcaagcagaagattgcttttggcaaaacatattgagctggtaaaacactaattagtatatttgagtctaggcctcaggacattttcttcaaatgttttcatttttattcataatttataatgtaattctcttttattttgaaatacacacttgttttggaggaaaactctggcaatataccaaggaagaagttatatctaaatgatttaaatagtgtttgctaagcatctttggtaactgtttttctcccttagaactataaaatctaacaaacataatttatggagatgtttagtcttgaacagagatgttatagttttgaaccggattaaatttcaaaagtacctttctatatcttgagactttttggtaatataaatcaaaataaaacatccataaaacataaaattctgtttctttcatctcttaagtttctgtgctctaataaactgttaggggtgtttgtacaccaactgtacacacatttactcatggatacaatgagaagctgagaatttttgagttgcacaattaggatgcaagaagattcttcaaatacttcgtcatagtccaaagactgaggaatgcatactatctcaaagagaaaaaataaataaggctcacttatctttcaaattagattgacaggctattagcataagtaaaattgtgtcatattaattattgatctgtaggatgttagagattgtgctagaaaacttaatgtgaggacatgatactcttactcacgcctggagagttagcagtaatgttagtgttatcctggccaactctgtcttttttcatcctaaatcattttcccatcaaccactgatgagaaattctgctaatgaagacatattcctttgtgtaaaacccacacatgaacgagatcatgatttttatgcaatcagtattagtcaccacagaatagtcttgcaataaatgttgtttaaatgtttctgaatatagaaaaaagagacaaaagtcagtaagcagatgacgaagtcctacttatagagactaaaccttttgggcttcatgatggcgtttctgccttatagagttattatgtgaagctactccaacgtaaaggaatacaaaaattaacacatcacatagaacatggtatgtcctcaataaattgaactgcctttcccctcacacatgtcctttatatctcccacaccaaagtggccaaatgggacactgttctatataaatacatatacatatatatatgtacatttatatatatatatatacacatttttatatatatacatatatataaaagagccttgtatggtggctcacacctataatcccagaactttgggaggccaagactggagggtcccttgagcccaggagtttgagactagactgggcaacatagggagtccccatcttctctcttaaacaatttaaaaatcagtcaggcatggtgccgtgcacctgtggttccagtgactcagaaggctgaggtgggaggatcacttatgcccacgttgaggctccagtgagctgtcatagcaccactgcactccagcctgagcaacagagcaagaccttgtctcaaaagagagaaaaaaaatcatctgtcacttttctatatatgacagtccatatacagttatcatatattgaccactctaaatctagccttcagataatctgactttgtttttaaatataaattgtgcattggcaaatctaaatctacctttcaaagtacatatagttttatttttttaagacactatctgattattaacaaatttgaacaaatttgtcatgtggctgaggatgaggggctgggagaggggagtggaactgcccctacaccagatcatttgatagtatttgtgaacaaagatcaatgtcaagtaaaaggacctttttctccacctggtctataaaggacccaccaaggcacctgaaattcccttgctcctgtgggacactaggagctgctgtcctctttcctacttcaaagccccctccacctgtttcctctgggataggggtagaattgccataatgttaagcagcaaaggaattgtccaaaataatcccctcttcatgtaaggtggccaaaacaggcccaaaactcattgaccaggctgcaagggggaggtagaaacacatgctctgttatccctgctctgtgtaaattaggtaacctgatgatgaagttaagagattgggagctgcctgcatcactacctctgcccattggagaggttggagctcaagggagcagctgctgactgagaaagaacaaatgccccactggattccccagtaatcagtaattggtatgtgagtattgatcccctccactgaagctgattcctggtacgtccaggggctctcattcacccaatggatggtccagtcctgaaggacactacctcctttcactcccaaattaaggaaggattagcatttttcagatatcagaaatttaactctcctgatagtctctaagtctattgttctacttccagacattatacctctaattgcctttttataaacactcactattaattaaaatgggggctgtctatagttgttcaatcattggccaattttttggagttctgttaatcctaaagcttccaacaatctctgctacaatataaaaatgtttaaatattttgaaggtggcagtgtctaataaatatctaataattgatttagtactttcagataaattcaataaaataattcttgcattatgtctactagaataattttattatagttataataattcttaaatactagcctttcgaaggcatgtgatcttcacatcatattttgttgctgtctcttccataacggtatgatgttttaacatatttgtgtgataaataaaatttaattttttagatgagaaaatctggtgtcaacatatatttcactgaaacaatggctgaaatttcacctgaaacaatatattaaaatgatatctgttgagtgtatcctttctaaattcaaatattaaaaccactattgcaacttgttaaaatgtaaaagtaactcagattatagaaagaattcactaaatgatgctctagtaacttactaaagacatttttaatgaagtcaatcaatattttcacttatctttatgagagttccaaaaagctagcataatgagcttttcacaatatatattttgtttcattatgcataatatcaccttaatgtttgtgggaatttagtgtttcaaccattcctcttactatgtgttgctgtttagaaatgtttctaaattttaagttagttaaagatcagtgatttaaaaggagcaattctgccaccttgtgttctgtaaaaccaggatagctgcttgcttccgggaaatcgccagtactttcttatcaaacttgaaagctgtaactctgaatcagaattctagaatgataatcagctgtgcccgtccccctgtttattttcttccaagtttgcatgtactgatcatggaagctggttacttaagctgtacctgtgccagagttaggactcattcctcaggatttctactaaggtttgtaaagccaaacaacaaaactttaattgcaaccatatgtcactctgtttaaattttatttatatatatatatatatatatatatatatatttcaaatttaggatatatgtgtacatcagaattactgaaatgctagttgatactcagctatacaggttatattatactgtttcaaaacaataataagaacaacacaaaataagcttacaatgtttaaaaacatacaacttttaagaggtaagaaaagttgcttgtggttttttgaagtcagataattaatagaagaaaactttcaaacttttggtaaaatacaacttttaatcagaagattagaaattaaacagaaaaggacctaccgctaataaggaaataatcattaacctattgatgtgtctctttcttataacggaaagtgctaggaatacacaatacattgtttaaagttttgcaatttatcattcttccctagaaaggcagaagatgaaatgccatcaaaagcctcaacttctgagtctgtccttctcttgtaacttggattactgaactctttgtatcatctgttccctttgtggatttattttcaagagaaaaatatacgttagtcttcacaggactaaactttttaagtctacgaaaaggcttcatcagaaatttatatacttagtggttggagtgaagagagagaccatcattttaatcagattctcaaaggcatctatgtccccaccttcccaaaaggataaaaattaccataaaaagtctctgatttgaattacacaactctattccctatgagtaaatcataaaatttaggtggcatgttactgccatcttgtgtctagtgagtatctctttcagtttccattaagtgtgctagttggagtgatcaataaagaaacattctaaattcaacctgtaggattctgcagggacttacatgaacaaaacatggaaaaacaatgaacttcaagctataggtcccttaaagcattattagaattattgtctaaaagagttttaataaattatagggctgctcatgattaaagatttctccttaatagttttagtcttaaacaactcatacttagagcaggaattagaattggcaggaatctcataagaaaggacacctagataataatttttctgcaaccgaaggcaaggaaatatcactaattcattgagatgttgcaattagtttttaaatcttggattcttaaggtgaatttctccaagtttctgagtattccacccaacatgtgccaaacttcaaaactttctaaagtttaggcatttcaacttgaaaaaaaaattttaaagcacaaacataaaaggaaaatgctgtgatgtattacacaaaatcagaataatttttcagcattgtgatttttagttatctggccaaactgtctgtgttgatttcacatacaatttaagaactaaaattgctttttgaacacttatgtataaaaagtgattgtaattctaaaataatccagaaatttaagaaatggaggattagttacagacatcagaaagaaaacacaaaagttccaatgctaaccagccagtccagcatgaacttttgaatattatcaacttcccaactgcatgggaagatgattggagagagctggcaactgcttttgagtaataagtatattttggagctcaatggaaagaagaactattaattttctttctcactagtgtgactacaaaattcttagttgtagaggcattcgcagatattatgagggtatttctagctaacaaataatttctagtttagagggaattcaaagtaaccctttggttaaaagaggatttggaagctggtcttgaagctgattttgaatagcagggacactgatctggtgactttgtggggagagcatcacttaatactgcttttgatagattgaaaactgctctttgagagaggaagaatttgatctcatgatatagcacttcagtaaaaaaaaaaaaagcagaaataagtagtataaaaataagcaccaataaagttaccttttcaggagaaattttcttcatattatatttttatctggttgggggggttgggggttggagacagatgagtttaattcaaattctccaactgacaagcattactcatattatctggatcaactcacgttgtttgagtctttgatcatacagctggcttcctaaacatgacaggatttcctaagactcctaagatatacttctaacaggaccctcagttaaaacaaatcatgcacgtttccaggatctgtttctgagccactcagattcttctattaacaagcatatctgaagtcagtgccctatacccatttttagactctcttacccgagggcagcctacctctctgaattggcagaactattgttagcatactgcattgttctgggtttgcccatctgatatgcctatcccagaggaagagctgcaggaactgatagaagtttggagagccatgtttccttccactccatgcttcttgaccaattaaaacaaagcgcagaagcggaaaaatcagtaatcacattacaaaagaacacaggcataaaaatctttcattttggacagtggaaactcaattttgctatatcttcctcaaaatttgcttagaaatgaccacaggaaaaaaaaaacaacaacaaaaacacagaaccagaaaagacctcataaggacatgtgaggggcttccggccagttttatgtgccccttgtgtctctggccacacctgactgagagcatagatgttctctttggcaatctttcctgctctttcactccagtggcagctggtctccccacttctctttgtgtttacccgattctatagctgcagcattcccccttctctcactgacattggctggactttgacttgaaacttgttctgtgcttgtagtgacctctgatgttgacctgttactatcttccactaaaatgcttcccaatgagcttccagtccctgctggcacttctttagccctaaggggcgaggatcccttcttaataccagtacctccctagtatcagcaccctgaacaccaacccattacaaaaaatgatgaacttctcaacgacatttctagcttcctctcttgaaaacttttggaatgtttttccaagggcttgaccggggtacattgaccaacaccacaaagtgttacaacgagagtacccattcctccactcccagtgttatcctgtggccaggatcaagtctaggcagctcagttactttcccactcaagataagctcccttctcatccaaagcaccttggagaaattgaaataacctttgaccccaccctgggtggaggtgtcttaagcctgccttctagataaaaatgctagttccagtgttttctgcaacatttctcctaggggagtcattaatttttcatgaagatcgtagtggcttttattcctaagctgaaatcaataaagttaatatgtaaaacaagcctgtcccgtgggatatttgtgtcacttaaaatgcggaactacaagcatgactggtaaaattggaatttttcctaaatttttaaagttgaaataaggagtagtttctgtttaactatgtttcatattcattccaaattagtgaaatgcacataaatattttctaagcactctgtatttttttaaaaaatttcttttgttgttacttatttaccccaaaatcacattttatgacttcaaatcatcttcattctttaaagctgtcatggatttggctctttcagattgatctcaatatatttctgactgtggtaacgtcaaaagccaatatcgatttctttcaaaaaatactgaagaaaacactctctattccaataaaataatttttaaaaatcatttctctcttaaactagtgtatttttaaagaagaatttaaataaaaagcaaggcaagcatttctacccttgtatatgactacaattcaaaagcttcgacaaagttgaaattttcttattgtcatttgtcagaatatatcttgcaaaacagatttattagtatttaccatccatacgtttaattctgtgtgagagtatgtatgtactttggcagtgcggtggagtatttgcatgctttaggaatttttgaaaggaagccccaggaagcaggatagttgatttccttgacataatcagctaaatgcccatcatcagccacttgtctatagataaagtaaggaacctaagtgtgttttgaagagcattagaaggggggaggtacctatctatatttcaatccatatttttcactgtcatataatccaaccccacaaacatattcaattggtttaatatccatggagatattttcatagttctacaaccatcctttgtcttgttcacatttgaattaagcgttttcctgagtaaatttcaaggatagagtttgagaaatttcaggaactcctttagaactgccaaatagaaagtttctcatgtagacaaatcattttttacaataatacaatacagtaataagaaagaaaaatcacataaattactaaaatctataatatctataatagtagaaaacttgatggttacgaagcaactttttttttttttttttttgagacggagtctcactctatcacccagactggagtgtagtggcgcaatctcaactcactgcaaactccgcctcccaggttcatgccattctcctgcctcagcctcctgagtagctgggactgcaggcgcctgccaccactctcagctaattttttgtatttttttgtagagatggggttttaccatgttagccaggatggttttgacctcctgacctcgtgatccacccgccttggcctcccaaagtgctgggattacagtcatgagtcaccgcgcacggccagcgtttttgaaattaattcaaatttctgaaaatctgaccaaatgaatatttttctttcttatatattatacgtgttatatactatatatatttaaaatgccagtttgaataattggcttctttgcattagatagacatttaaaataaaaaaaagaaattgattaagataagtaaataaaccagtctttccgataacgctacaaatttattctaagttttactcagaataacaaatactattttaaatttgccatacccttaagcatatataatcaataagtttctttaaataattgttatttgtaagaatatatcttgcaaaacagattttcaaagttgaaatttctaaggcatgcaactagaaaatgtttgaggaaaacataagaaaattatgccttgtttctcaaacattttctagttgttggttttagtgggaagtttcatatcacatataaagaacttccttaaaaaataaaaaatatgccataactttggaatcatataatataccccacttactaacttgagacacatgttttaaaattatatttagagaaaagagactttcaatgacaatttgattgtgaacacagaattataatcgaaacttggtagcactatgtggctttttttccagacacaataggtagggttttgatttgatcacatctccaggaattcagtgtggctcacactgaaattgttgtggttcacacaagattgttgagcacaatcttggattacactcattgaaacctagaaggggaaatgaccaacaagagatttaacagaaagcatactttgccatatggcttctaactgtttgctctttgaagctcagtgagagagatctgagataccacagcaatgtttttcctttgtcatgaaagatttgtctaggaagacagcagaagccatgaatttgacatgctagtcaaaatacaagaagtttaaggcaacagatgaaaaagcagagggcctgcagctgtttcaaatgagttcccatggtgctgagcttctttcgaagagggccctatctcagaataaagccacaagagttcttcctaccactaaacagccctgtaggttaaaacccatgacagccattctattgacttaaattttgatagatccttatttatgcatcgaagtttagtcagtaatcttttgcataaatgggatataattagtgatgtatgaaaattcactaaataagctttccttctttggcttatgatcctcagaattaatcaataatcttttgcattttttgttctaactctgggaattttcatgctattctgaaccttggatgtttaaaatgcataataaaatacatgaagtccaacctctcctcaattaaaatctaataagctttgaaaactctattttgaggtatcactagagatcatattttacaaaagattgtattattctgttctcaccctgctatgaagaaatacccaaggctggtaatttataaagaaaagaggtttaattgactcacatttctgcatggctggcagcggggtgggggtcctcaggaaacttacaatcatggcggaaggcacctctttacagggttgcaggagatagaatgagtgccaggaggggaaatgctggatgctcctatgatgtggtttgactgtgtccccaccaaaatctcatgttgaattttagctcccataacctccatgtgtcatgggaggtacccagtgggaggtaattgaattgtggggcctggcctttcctgtcctgttctcgaaatagtgaataagtctcacaagatctgatggttttataaagaggagattccctgcacgtgctttcttgcctgccaccatgtaagacgtaccattgcttctcctttgccttccgctatgattgtgaggcctccccagccatgctgaactgtgagtctgttaagcctctttccttcataaattacccagtctcaggtatgtctttattagcagtgtgagaacagactaatacacttataaagccatcagatctcgtgagaactcactatcacaagaacaactgggagaaacctcccctatgattcaattacctccactgggttcttctcacatgggggtgttatgaggattacaattcaagttgagatttcggtggggacatagccaaacgatatcacccatagatcaccttttttttattcatgagttaattattttgagaaaagaatcttagtatattcctaaaatttagagaaagactttatgtctaaaagaatgtccattagaaaattgtcactggggccaggtgtggtgggttatgtctgtaatcccagcactttgggagcccaaggtgggcggatcacttgaggtcaggagttggagaccagcccaaccaacatggtgaaaccccgtctccactaaaaacacaagtgtgttggcagtgtggtgtgttataggtgtggtggcagacacctgtaatcccagctactctggaggctaaggcaggagaatcgcttgaacctggggccataggttgcagtgagccgagatcacgctactgtactccagcctgggtgacggagtgaaactccatctcaaaaaaaaaaaaaagaaaagaaaagaaacttgacactggttggtttgttttgttttgtttggagcattgaaacaattgtcttccaactattaatccatcatagcaaggttaaaatgttaatgcaactattatatttaaaaattagcatcctgatgaaattataaacttgaccacattgcaatagcaccaacaatggattactcatcacacataatgacccatttcaaatttaaatgatattatttagtgcaattgaattagaatgatcaaatttctatctagaggacatatgtgatgactttatagtaaattgccataaagacagtaggcagtgacatgagaagaggtcaaacaatttaaagtccaaaagatataggaactaaagatgactttgcacccaaacttctttctattttctttttacctgctcttcatgcaatatataggaacaacttagggttgtaatgcagtgcctgggagttcctttatatcacatttagttgctatgagagttcctggatgagaaaatcagggacaatccaaacggagtggacatggagcagaggcagagaacagcacatcacagtgagaagggaataaagaagaataaagtcaatgcaaatttggcactttccaaccatttgtttctccttgtgacttttaaaaatcttttgctaggctatctttaagctataattcgtagtctcaacagaaggcacagagtgagtagtatccagaccactacaactcaaggaaagaaggcctttctttaatggatagcaatttaagactacaagagttcaccgtttttaccatccttggaacaatatgtgtgccctagggagagataattacttttaagaacttcaaatctagcacctttcaccaacttaattctttgaaaatgttagaaaaacatgactttttttcctcaaacttgttctgaactgacttcaatgttcccacccagggagcaattcaggaaagattcttcttgccaacctttcatggctaaatttctcaagcatgacctaggttagagtaaagttgcttcagtcttgggatgattgccctttttccatttatcggttttacatttttgtttcatctctgcaggaaagcatttgtgtggctgggggatgaggaagtgtgctttttgtgggattgcatggtctcctaaactatgattttgtcactttaagatgaaaatgctgacagctagggtggagagtcaaagaaataaaattaacgcccttgtctggtgttcaaagtaatgatttcatatgagtgttacaatgattgttccatactaggataaagactcatgctgatgaatgacttaataacctatggtaactatgtgaagttgttttattaaagatggtggcctactgatctctgtctcttctgaaaacaaaatgaggataaagaagtacaaactatacccacagcaagagagatataacagatattctggattttctaattacagtagttgttatgaaagaaatcaatttctaaaaaattgtaagtgatctctagtaagaaatcagtctcccttagtgaaataaaaatatacctgaaagtggcttccccccgcacccccacccccggcccaatggtagctggcatgcttcatgggacccaagcctatgacattaaaattgacctccattgcattaagggaaaaagactcttcttccacttgtttgtgtatataaggaccttgagttccccacatttatttcagagtcaagaagcaaaagattaagcactggacattagttaaataatgtaatgattttcaataaaattcacaggttaccccaacaatcatgggttaactgtgtcctataagagcatagtaaaatctacaatcttttcattatatttggtagcaaagcatactgcacggctataacttcttctctgcccttgctcagctacttcctctcctccagttcccctttgccatccatgaccagccatgcacatgcatgaacagtcagaggaggaacagggatgctcttcaggaaccgttatgagagcccctgagtgtctgagaaatgcaattgcctccactgcactccaactcctaccaatagctcctttccccattcttttttggaggaaaagctaggttcctaactccacttcaatcagtcacaactcacttcatcacatgtgtcctggatgaagttataaaatcagatatccaatgaagagaaatggtgcaggtattaactttgggctgatttccggtggtatattctcagattcttgcctcatttcctctactgttttgtcatagaatgttaagggttttctagagacaataaagctgaaagcaatagaaagaaatcttggctggaaaatgaaaagaaaataatccttcaatattaagatcctttaaaaggagatgaaggaattacattaaatggcaattacagtgcagtaaggaaatgactccaaggctggtaagctcatcatgattttgggggagaattcatagtagaacaggaaaaggcaaagctttggaaccagaacagagcccccaatgcatttgtgcctgagggatgtcactggggcaaaggccattcatgtagaggtctgtgagaaggccatcactgaggcctctcctgtctccagtggccctacctttccagtgtgacccaattctcaagacatctaagaattattatcatggcctatgaacatctgactagatgtttaatttactcagtggctcccatgaacctcacaagacctcacagttggggtgctaagaaatgttgggaatggaggaaaaaaaagttatcatttttagttacttgataaaagttaatcacaattcagttggtaaattctcaatcatcattgttcaaatgtcagctaaagtaaatttccaaaccaatcttgcccaacagttgatcactctttccatgctcgacagctctaccttgtaaagagttattggccgggtgtggtggctcatgcctgtaatcccagcactttgggaggccaaggcgggagaactgcctgaggtcaggagttcaagaccagcctgttcaacacggtgaaactaaataaaatacaaaaattaacagggtgtggtggcatgtgcctgtaatcccagcttctcaggaggctgaggcaggggaattgcttgaaccagggaggtggaggttgcagtgagccaagattgcaccactccactccagcctagatggcagagcaacactctgtctcaaaaaaaaaaaaaaaaagagttatttataggtttaatttattacttgagtcttctcttcctttgcttccctttccttttcctcccttccttcctccctccctcccttccttcctccctccacccttcctccttcctttctttctccctccctccctccctcctccttcttccttccttcctccctccctttttcttctccttctccttctcttcctcctcttcttcttcctcctcctcctcttcctcttcttctccttccttccttcctctgtcctttctctctctttctctcactcttcctttttttctttctttgtctgtccccctgactttagagaaaagaaactgtatcatctacggttgtgttctgtcataagaatttgataaatatttgttgggctgaatgaaactgaaggttgtagaagtcactcttagattcttggaaatatagttgctcaactgtaaaatagtcatactatctttttcttagggttgctggactaattttaataatttgccatatatgtctggtaaatttcatgccctcagctaaatggttgttgatgtattactattttcaggtatgatattatttttaatattttcataatatgtgtattattattattgagacagaatcttgctctgtcacccaggctggaatgcagtggcgtgatctcggctcactgcaacatccgcttcctgggttcaagagattctgctgcctcagcctcccaagtagctgggactacaggcgcatgctaccacacctggctaactttttgtatttttagtagagacagggtttcactgtgttagccaggatggtctccatttcctgaccttgtgatccgcccgcctcggcctcccagagtgctggcattacaggcataagtcaccgtgcctggccaatatctgtattattatcactactactaataataattgagctcctaggtgggcctggggtaaactttatctgctgaaggcttgaagtgattgtgtttgtcctccaaatacagtctaaatgatttcagtaaagcagataccacttcttttttgcattttttttctgttccaattatgttcttggttatgctttgtctgccttttacttcttataattttttttcaagttttcttaagatgacttctctcattctaatggttttaatattaaatttctaaatctggttttaaaatgaagcaggattacaaaacagagaagagaacatgtttgcagattaagctggtattagattaataaataaaaactttttaacatgggaatgccacaattttgtggcagctggggacaaatgtttctagtgttttttgtggcagggaaatgcaatcagttcatatggaagatgaatttagtttttggatgttcctccttgtaattaataataaatcctggtaaaaataatgagaggaaaacacgaaacagaagaaaagaatctccaatctgtgactggagtgtaactgtttggataataattattgccacattttttgtatcattacgaaagtaaaatatcagaccaacattcacattgttttataaaagaaaaacaggaacatcattttgttcctgatacttggcactgacatttctacatattattagaagtagcatttgtccctttactgtaatgttctgttttgaacagattgattttgacattctaacaaataaccaacatgtaggcaattgaatattttgattttttcccaaagaattagttaaaacttacatatacctttgaagagtcatcaacttttaggtagcatttaattaaagcaatgagaccagatgaaattacttagggaataaacagaaatgcatagacatttttgtttgttcttagttgccaatcattgaaaaaatgataaattatcaggcaaggtaactggtgatcagtttcattatcaaagaggaataaacaactatagaaaccaaagggaaattgtcatatgaaagtaaaaatccttttgggattagatagagggcactggtctagtaagataaagcaaccactcaaaatgttagaggtgatttgagagcttggtatcccttgctgaagccaaatttacatatacagttgattttactatttattgaagtttactttcccaggagaaaaaagaaaaaaaaatgaatttttcattttctgttcttcttaaattaggcaaattctgaatagatttatattttactagctcacattctacttaaaatgaacaagtacaaatatataactttataaccctattttctgactttctactctagtgtggctttctcctcatgctgactgcttccagattaataatctcagagcaattccagaagtgcaggggagtcacattctctatttaatgtgcagcaaaatgccaatagactctatttgcctaaataaccaaaaagatatctataaatatgcatgcataaaaatcctataaaaaataaaagtgttaaagaagtaagtccaatcaattgtaaaagtgtttgctgtcgttgttttgaagagtttctttcttaggtctttggaactatttcactttgtatgggaagacagcctgatttttcattagtagaaatagtagtggtataaaaacagtagtaatagaaaagatagcgtatgtaaatatactatttccgagtttaagaattggtgaagtaggttaagaaacacagccatgaacctttcaggggtcatggcacagagcaaagataagcatagagtaatatggaggtgttgtcttgactgagcctctatctaactgaatacatgctattcaggtccttcaaatcaatttctgcatgtttatttaatacatataagttgctgtggttggagtggcttactggatcacaattctcatctcattccttcaatttaatatggctgagcctaagaagggtcacttcttaaactatgtttatttcacttgggaaactaaatttgtacaatgtttagagaatatagcttttctctgctcctctcagaaactgaaggtttgttcactcacatttttgacagttgatgatcactctctactgagagtttatctggggctaccaaggagaaaacctacacatggcctctgtgctttctcacaaaatggtagctgagtttcagagacaaatgttctgagaaagaaatagtgatggaaataaagggagaaggagagagagagagagagagagagtagacagaagccttagaagtcatgcaacgtcacatccactgcattctgtccatcaagccagccgcaaatgccaccaaaatgcaagggcatgaaaaatagactttatgtctttatcagaagaggcagaattctgaaaaagcatgtaggcaatagaatctctcataattggtttactcgacatgctgtcagtatagttccatggaggaattttgttgttgctgtccttattttctaaagaggtaaagttttatcatgaagaacagaactgatgaatgtgaaggaaagaaagataaaacaattaataagcgtgtccatatttacatgtgtattcaggctaagtatgcgttccttcaaaaggctcctattcaccgcttgaaactgcatggggaaattgattcatggctaaatataaatagcagcttccattttaatatacagtcttccttggggtaacaggaaattggcatgacttcacacatcaaatattctttttcctccccttcctccctctcctcccgcatccccttctgctgcttcttccttttttctcttttataaaataattttgcattatcctccaaataatagttatacctcatcacactccgtgcccacactgtttcttcagactttagattaaatccaaagacataatgtaatggccagtgattgtcaaagtgcagaaaaggtctatctagggaagaattctcgataggaagaaaatgtggaacactctaatggaaagagaggagagtcagacctattctcactctcttccttttggtgtggacatatggtaggtggacagagggaacgatgcaaaacaaacaccagcccagtgaggagggaactcaacgctatttggggaacagttgttgctttttgtggtatagtttagagaaatttcaagtagtcatgtttaggtttggttaggagagatgactagataggttatctggagggcttttcatgatcttcacagaatgagtggcacagtaattggtgatataagattctatgtgcccagaataaagcacagaaaacatgagcaagaagaggcctccaggggagtcagagttaaaaaggcacagtatttaaaaatgtcaccaccagtggcaaatagttgagtccaaggacttcagtaatgggtattggaatgctaaccacacagcagatagggccagtcctgcttcactagttgtgggttcagggaccaaaccagaaagtccctgcttagcagagaccagcaagattcagaagacacctcgtagatcagggaacactgctatggaggttctcccttcctgcacacatgtggagaggaagggtggaggagaagaaaatctaaactcctaagcacttgtacaaagaagactgatacatccaaaagtattatataaactggaagggactgtgattctatcaacttcaggttgcaatttaggttttcctgaccacttataaagtactgttaatgaggataatcagattggttgtagtaaattaagaacaacaatattttgcccatctgagtacatgctcacctagcaaatgtgtgagccttcccccttagagaatcttgaaagccttatcatgaaagaacaaatttagctgacgtaaaagaacagaatgtcttcccttaggaaatggaggtccaaggtattcaaatggcctgcttacaagtagcagaatagaaatcagcattcaggatgcctggcatccagttcagttttccctgccacaccatgtcccacatgcagtcaggtctgcttgttctctaatggaaagtcaacggaggaatgagttcagatgggaagggagagaccagattaaaggtgtgaaagcccagaacactaattggcaaacgtcagttaatttttaaatataatgtcttcatcattaaacacttactcttctcaaaccatgtgaaatcattaaaggacgttactgagtcaacagaaaaaaagacaaggtccatcttggatcatttcactgttggagactaagcagaagtgaaaatctcctctaacaaaattagccactcaaatcatctaaatgagctcaacaatgttatactagattacctttcagagtaattagaccacccatgcctgtcaatttaaggaggctactttctggaatgtgttgaacttgacatcattcccaaactggtagaaaatggaataatgagaattacagttttgatatcttttgtttagccaagtatgctttcttccactaagtgatcatagcatttcttaatattatagatacttcattttctttgttcaacccattttgtaacatgctatgttactttattattttgaaaattgtagaattgtgtctattcttcttaggcatattggtcaagctgtaattttttttggtttagcataattagaagtctggtataaaaaagtgttttaaaaactattacctaaaaaagaaagtatggggcagtgtagcttatgagtaggaaatttcatttgtttgtgtgcacaagtaaatattttcatggtgaagtcagatgcatttgcatgaccaaagctctatttgcatgtacaaatatgggtttcaagtacccaatacaattaaattacacaaacacatatgctaatataatgtgttgtagttgtcgagtttttttctcagtaaaatatcaaggatgaatgagctcattagttccacagtaagcaattcttctccctcaaagcatcttattttaaaatactccacatcccttgtaagttggattcctaggtattttattctctttgaagcaattgtgaatgggaattgactcatgatttggctctctgtttgtctgttgttggtgtgtaagaatgcttgtgatttttgtacattgattttgtatcctgagactttgctaaagttgcttatcagcttaaggagattttggtggcacatatacaccatggaatactatgcagccataaaaaatgatgagttcatgtcctttgtagggacatggatgaaatcggaaatcatcattctcagtaaactatcgcaagaccgcatactctcactcataggtgggaactgaacaatgagaacacatggacacaggaaggggaacatcacactctggggactgttgtgggttggggggagggggtagggatagcatcgggagatatacctaatgctagacgacgagttagtgggtgcagcgcaccagcatggcacatgtatacatatgtaactaacctgcacgttgtgcacatgtaccctaaaacttaaagtataataataataaatgaaaaaataaaaaaaaataaaataaaatactcatccctctacccttgcaacttatagaagtaaaaaacaattttttaacttgaagaaatacttttaaaaggcaaatatcccacaaaatatttactttaattacaacacaagcataacacagtttttaagaaagattttcaattcctctaagaaagttatatagaaacctattaaacagctacaattttaggtgccaaactcaccatgctattcctagagagaagtaataatttttttgaaaggtggagaaattctcgcaaggccatgggaatcaattttaggtggacccccgccaggcctgtgactctatcaacccttaagatccgctactttgctggaaaactcttcctattttctcaaatgtggcattacaggcagtaaccattattgaatactcagaaaggaaagtaaatcttcaagtgggaatatttttaaaatatgcctaaaatgtgaattttagaaaaataactttcctctcttacaacttttcctcattagtagtatctttccaaagttaccttgtaagttaaattaaggtttaaaagtgcttttatagtaacttgatcatgttttaagaggttcaaaaacaattattttattaaggccttggaaatagtttaataaattcatgcctaaaatttttttaaatttttctttatttttttcctaataacattttctgggctaaaggacttctctcaagttcacattcaatgatgtatattgtttgaataagtatattcagaagtcttccaaaacaagcaattgtgaaaatttagtaaggcttacttgggcccaaagtatgattttcttcagagtagtttcttattcttttagactgtaagcaatggacattatatgtatttgcatttatactatataaaaatgtatttatactatatatataaaatattcactataacatacataaacacaaatataatgaacattttatttatatgtagtataaattcactatcactatatgtattatacatacagtagtataaattcattgatatcattctctatgaaatactaaaaattctattcagcacatcaggctcattcaccaaaaaaatgattttgtcatcatgaatttcatagcattcactctgtactaggagagagagaggggttggaagtcatgggacttccttttaggacactgaaacctagttgtgaagaaacatgcacaaaatgatctattacttccaaaatgttatatcaagatcttaaattgtacatcccaacaaatgtaaataagtgatccgatgtgaacggcacttgaaagggttgatgtggagttcactgtcattgtcagagtagcacagactggcagaagaagacttcaggtgtttagatagaaggaatgatctcagcaaaggaagagaggagattagaactcctcagcagaagccaaaaagcagtcagaagttgctataagctcccacttataaggcagaacatgtggtatttcgtttgctgttcctgtgttagtttgctaaggacaatggcctctagctccatccatgtccctgcaaaggacatgattttacacaagaacacatagaggggaagaacacacactggggcctttctgagggtgaagagtgggaggagggagaggatcaggacaaacaactaatgggtgctaggcttaatacctgggcaatgaaataatcggtacaacaaatgcccatgaccagctttacctatgtaacaaagctacgctggtacccctgaacttaaaataaaagtaaaaaaaaaaaaaagaacttgccataagcgtgttaaaagaggaatagaaattgagaatatgtaatacaaaagaaaaatagagtcatgcctactgaccacattctgggagccatcacacaagccagctctgttggattgattaattttatgtagccacagtgtggctagaaccttatcatgcatcttattattcttttcacataacctcacgcatatctcaccattgaggacaacggtgagaaccagtcttgtcttcattctagaattagagtaatagggacaacaaaaacaacaacaaagtcatggaacatctaactgtccttctatctaaatgtcaacaaacaactctgatgtgtcatccccaccccgctttacagtgaatgttgtcccaattatagttatgatctttgtattctggaaaatgccaaaggctgatgcgcataaaagaagaggtccattccaaagaaggccagggaaaaaggtatcgagagatgaggagagcctggaagataaaccttttggcccaaatatagcttcccattcaaagaaagaattctacagcggtcaacgcttccatctccaagacctattatgagcacatttaacttctggccagattcccagcatttctgctgttctttgacttttctactggtccacaatgatggaaattcacacacaaaaggatatgtagagtaagagtgcacaaatatgggcatcttctattcacccattgaaagacagggtccatttctgaaggcatgcttgctatttccaccaaataaaaggagtaggaaacataaaaggtctattagatcatcttgtcaactctttttcttagtttcgtcaacagtccaggatgctgtcaaatgaaactcctcactttagggcatctccaaggataaaggcaaggcacgcctctggaatttacatagattcccagtctgccaaccagctacaacaaggttctatgattcatgattagaaatgatgaaagaaagtaacactgtttatcatcacataccacctccctgtgtttctttctcccagaattaataaatgcaatgacactgaattcacaaaaatattgtatttttaagctttcatatgcaatgattcctttcattgctattaataaacaagaggactcctccagctgaactctttcactgtgtgtgtgtgtgtgtgtgtgtgtgtgtgtgtgtgtgtgtgttatatctgacaagtttgctgtactgtgctaatgagccctaacggttttaacataagtcctgcagggctggactacttgaggcttattccatcattgaaaaaaaatgctcaagcttatggccatactagacgttcagatagcttgaagtgaaatacagtctgtcaatctgttcagtgtcatacctataatcagaatgctgggaatgtgcacaagtccttgtgctttttcttatgaattggaagacttttctttcttaaataaaaggaaacagatcatgcagcatgttgagtagaaacaggctggtgcataacaggagaagaaaatccaatggaatagccacacacagattgcctttacttctaggttggcaggcaatgtaagatttggaattaacaccagaaaggaatttctcccatctctttccatggagctggctcactgatgttcaagccatgttaatagtctcagactgctggctctggaaaatgctaaaggtatcaaaaggcactcagagatttaccagtgaatccaaaatataaaagcatttatccaagtgcacccagtttcccagtcttcattaataatcaggtaattgaaagtgttctcatctctaatgcctaatgcagtgaattatgtgcagtcttgccaccacatctatgaggcacgttaaagcccatggtgggttctcaaccctggcggcatgctaatgtcacccagagagctctcaccaaatacctacatccagggcccatccccagagattctggcttaattggcctgaagtagagccaagccttggtattttgtattgctccccaggagattctagtgtgcagccaagattgaaagactaaaatgaacaggctgaatctgaaatgaattatagatacattataataacatgtaactctttattagaagactcagaactttctagaaaaaaattcctctgactcctcaagactgctctcactacttcacttaatgtctcctgtgtatctcagagatcaggagttacttggcataaaatgtgtgtgagaggcagccttgcgtaatggttaagagcacggtgtttatattcttgggtttaaatccttactcctatttagtggtatgatcttggttgaattacttagttctgttcctctactttccctctgtaaaatggtaataatagctccagttgaaaggattgaatgactcaatgtgcgtgaaacacttacactgtgcctggcccatgggaagctctacatatgtactggctattactatccctaaactgccattagctgaaaaacaaaaatgtatgaaaatccaaacccaaagtgtttaatgcttgaacagcgttctaaacaagaatcagcttttgttttccctttactgtaagtctagtatgcaatgacctctacaattcttaatattccacccaggactcagccaaatgcactagtttcttccatcaaaaaggctgcatgttttttgccagtattgtcaaattgggaatcagttattacataattttgtgtttactaacagcattgttgcaataccataaaaactatagtttgcaaaagagcactgtatttccagatgttttgtgcacttctatagcagttttggtgatatctggagaataagcattatgtaaacctgaaatttaaatttccatttgtacaataacaagactgacataatgtggatgcaaagtgtggtagttttttttttttttttaaaaaaaggaagaaaaaagctaaaaagtcttttgtataagcatgcgccccgcttaactagctacttcactgtttgacaaaatatcatttggaaactatgtcggtaaataccatcaatcccatttagaagttgtactgcactgactctgaaatattgttttgcttttaattctgcaggcataatttttccagtgggtcagaatcaagattacaataatgtgaagcagcggaagaaaatctccctgctgttagaagaaaacatggttatcctacctattagcagacaaacatggaaatatttgatttaatttaacgttgacataatttaatttgacttaatgctctcccagggaacagtgatttctgatgtcaggaactgcctttcctttaaggcacatgcttcttctttagaggtaaggaactgcaaacattttctgtaaagcaccacgcatatacattttagattttgcacccatatgttctctgttgcaatactaaactctgctattgaagcaagaaagtcacaaataaatgagcatgtctggtatggaaggctggataatagtttccaaagaaaagcagattctaatacctgcaacatgtgactactgccttatattgcaaaaggaactttgcaggtatggttaaatcaaggatcttgaaatgaggagattattctacatcatctggatgagccctaaaagtaatcacacttgtctttaaaaaagagaggcagagggacatttgaccagagacagaaggcaatgtgacaactggagcaggatgctatgctactggcatgaaagatagagaaagggccagatgccacaaaatcagtttttacatgtaaaatacagtgttatcaactacagggacaatattgtacagcagatctctggtacttactcatcttgcctaattgagaatttatgctctttgactagcaactccctacagccccttgcccccagccccaggttaccaccatgttaccc
